(19) United States
(12) Patent Application Publication
(10) Pub. No.: US 2015/0177247 A1
(43) Pub. Date: Jun. 25, 2015

(54) METHOD FOR IDENTIFYING MARKER SEQUENCES FOR GYNAECOLOGICAL MALIGNANT TUMOURS

(71) Applicant: Protagen AG, Dortmund (DE)

(72) Inventors: ANGELIKA LÜKING, Bochum (DE); Axel Kowald, Bochum (DE); Annabel Höpner, Bielefeld (DE); Peter Schulz-Knappe, Hemmingen (DE); Christian Scheer, Dortmund (DE); Heidelinde Fiegl, Ellbogen (AT); Günter Daxenbichler, Innsbruck (AT)

(21) Appl. No.: 14/633,773

(22) Filed: Feb. 27, 2015

Related U.S. Application Data
(63) Continuation of application No. 14/365,413.

(30) Foreign Application Priority Data
Dec. 16, 2011 (EP) 11194099.5

(51) Int. Cl. G01N 33/574; C07K 14/47

(52) U.S. Cl. CPC G01N 33/57411; C07K 14/47; G01N 2570/00

(57) ABSTRACT

The present invention relates to a method for identifying marker sequences for gynaecological malignoma, the marker sequences identified with the aid of this method and diagnostic use thereof, diagnostic devices containing marker sequences for gynaecological malignoma, in particular an arrangement and a protein array, and use thereof. The invention also relates to method for the screening of potential active agents for the treatment and prevention of gynaecological malignoma by means of these marker sequences.

[0001] The present invention relates to a method for identifying marker sequences for gynaecological malignoma, the marker sequences identified with the aid of this method and diagnostic use thereof, diagnostic devices containing marker sequences for gynaecological malignoma, in particular an arrangement and a protein array, and use thereof. The invention also relates to methods for screening potential active agents for the treatment and prevention of gynaecological malignoma by means of these marker sequences. Protein arrays are gaining increasing industrial importance in analysis and diagnosis as well as in pharmaceutical development. Protein arrays have become established as screening tools.

[0002] Here, the rapid and highly parallel detection of a multiplicity of specifically binding analysis molecules in a single experiment is made possible. To produce protein arrays, it is necessary to have the required proteins available. In particular, protein expression libraries have been established for this purpose. High-throughput cloning of defined open reading frames is one possibility (Heyman, J. A., Cornthwaite, J., Foncerrada, L., Gilmore, J. R., Gontang, E., Hartman, K. J., Hernandez, C. L., Hood, R., Hull, H. M., Lee, W. Y., Marcil, R., Marsh, E. J., Mudd, K. M., Patino, M. J., Purcell, T. J., Rowland, J. J., Sindici, M. L. and Hoeffler, J. P. (1999) Genome-scale cloning and expression of individual open reading frames using topoisomerase I-mediated ligation. Genome Res, 9, 383-392; Kersten, B., Feilner, T., Kramer, A., Wehrmeyer, S., Possling, A., Witt, I., Zanor, M. I., Stracke, R., Lueking, A., Kreutzberger, J., Lehrach, H. and Cahill, D. J. (2003) Generation of Arabidopsis protein chip for antibody and serum screening. Plant Molecular Biology, 52, 999-1010; Reboul, J., Vaglio, P., Rual, J. F., Lamesch, P., Martinez, M., Armstrong, C. M., Li, S., Jacotot, L., Bertin, N., Janky, R., Moore, T., Hudson, J. R., Jr., Hartley, J. L., Brasch, M. A., Vandenhaute, J., Boulton, S., Endress, G. A., Jenna, S., Chevet, E., Papasotiropoulos, V., Tolias, P. P., Ptacek, J., Snyder, M., Huang, R., Chance, M. R., Lee, H., Doucette-Stamm, L., Hill, D. E. and Vidal, M. (2003) C. elegans ORFeome version 1.1: experimental verification of the genome annotation and resource for proteome-scale protein expression. Nat Genet, 34, 35-41.; Walhout, A. J., Temple, G. F., Brasch, M. A., Hartley, J. L., Lorson, M. A., van den Heuvel, S. and Vidal, M. (2000) GATEWAY recombinational cloning: application to the cloning of large numbers of open reading frames or ORFeomes. Methods Enzymol, 328, 575-592). However, such an approach is closely linked to the progress of the genome sequencing projects and the annotation of these gene sequences. In addition, the determination of the expressed sequence is not always clear due to differential splicing processes.

[0003] This problem can be avoided by the use of cDNA expression libraries (Bssow, K., Cahill, D., Nietfeld, W., Bancroft, D., Scherzinger, E., Lehrach, H. and Walter, G. (1998) A method for global protein expression and antibody screening on high-density filters of an arrayed cDNA library. Nucleic Acids Research, 26, 5007-5008; Büssow, K., Nordhoff, E., Lübbert, C., Lehrach, H. and Walter, G. (2000) A human cDNA library for high-throughput protein expression screening. Genomics, 65, 1-8; Holz, C., Lueking, A., Bovekamp, L., Gutjahr, C., Bolotina, N., Lehrach, H. and Cahill, D. J. (2001) A human cDNA expression library in yeast enriched for open reading frames. Genome Res, 11, 1730-1735; Lueking, A., Holz, C., Gotthold, C., Lehrach, H. and Cahill, D. (2000) A system for dual protein expression in Pichia pastoris and Escherichia coli, Protein Expr. Purif., 20, 372-378). Here, the cDNA of a specific tissue is cloned into a bacterial or eukaryotic expression vector, such as yeast. The vectors used for the expression are generally characterised in that they carry inducible promoters that may be used to control the time of protein expression. In addition, expression vectors have sequences for what are known as affinity epitopes or affinity proteins, which on the one hand permit the specific detection of the recombinant fusion proteins by means of an antibody directed against the affinity epitope, and on the other hand the specific purification via affinity chromatography (IMAC) is rendered possible.

[0004] By way of example, the gene products of a cDNA expression library from human foetal brain tissue in the bacterial expression system Escherichia coli were arranged in high-density format on a membrane and could be successfully screened with different antibodies. It was possible to show that the proportion of full-length proteins is at least 66%. Additionally, the recombinant proteins from expression libraries could be expressed and purified in a high-throughput manner (Braun P., Hu, Y., Shen, B., Halleck, A., Koundinya, M., Harlow, E. and LaBaer, J. (2002) Proteome-scale purification of human proteins from bacteria. Proc Natl Acad Sci USA, 99, 2654-2659; Bussow (2000) supra; Lueking, A., Horn, M., Eickhoff, H., Bissow, K., Lehrach, H. and Walter, G. (1999) Protein microarrays for gene expression and antibody screening. Analytical Biochemistry, 270, 103-111). Such protein biochips based on cDNA expression libraries are disclosed in particular in WO 99/57311 and WO 99/5731.2.

[0005] Furthermore, in addition to antigen-presenting protein arrays, antibody-presenting arrangements are likewise described (Lal et al (2002) Antibody arrays: An embryonic but rapidly growing technology, DDT, 7, 143-149; Kusnezow et al. (2003), Antibody microarrays: An evaluation of production parameters, Proteomics, 3, 254-264).

[0006] Cervical carcinoma (Carcinoma cervicis uteri), also referred to as collum carcinoma or cervical cancer, is an aggressive (malignant) tumour of the cervix (Cervix uteri). Globally, it is the second most common aggressive tumour in women. Histologically, it is a squamous cell carcinoma in the majority of cases. The most frequent cause for a cervical carcinoma is an infection with certain types of the human papilloma virus (HPV). The cervical carcinoma initially causes no pain, just occasional slight spotting. Only when the tumour is larger and degrades with ulcer formation is there a flesh-coloured, sweet-smelling discharge. In the early stage, the complete removal of the change by means of conisation is sufficient. In the advanced stage, the removal of the entire cervix with surrounding tissue and sometimes also further organs is necessary.

[0007] In the global cause of death statistics of gynaecological malignomas, the (invasive) cervical carcinoma growing into the surrounding tissue therefore occupies first place in particular, with a mortality rate (lethality) of more than 60%. In Germany, approximately more than 6,000 women newly contract cervical carcinoma every year, and approximately 1,800 die as a result of this disease. The likelihood of survival of patients after a period of 5 years is approximately 60%.

[0008] Cervical carcinoma is diagnosed most frequently in the age range from 45 to 55 years, however preliminary stages may already occur in patients aged from 20 to 30 years. The average age at initial diagnosis of cervical carcinoma has decreased in the last 25 years by 14 years and is currently at approximately 52 years. A peak between the 35^{th} and 54^{th} year of life can be observed in the age distribution as well as a further rise from the 65^{th} year of life. In 2003, the frequency of the disease demonstrated an altered age distribution because the diagnosis was made much more frequently in women aged between 25 and 35 years than in women aged above 65 years old. The disease may also occur during pregnancy. Here, the incidence is 1.2 per 10,000 pregnancies.

[0009] It is assumed that a large proportion of cervical carcinomas are caused by the human papilloma virus (HPV). A test for early detection is constituted by the pap test. However, cell changes that constitute a preliminary stage for a cancer disease or even subsequently a carcinoma develop only in 2 to 8 percent of HIV-infected women.

[0010] The diagnosis of a cervical carcinoma can only be made by histological examination of tissue pieces. These are either obtained through a selective sample removal from an area at the cervix abnormal during a colposcopy, a conisation following repeatedly abnormal pap test, or a scraping in the event of suspicion of a change in the cervical canal.

[0011] Michael E. Hudson et al. (PNAS (2007) vol. 104, Nr. 44, pages 17494-17499) describes the identification of markers for cervical carcinoma with the aid of protein microarrays. Here, the sera of cancer patients are compared with those of healthy subjects in order to identify proteins that are expressed differently. It was found that 49 proteins are expressed differently in the tissue of cancer patients compared with the healthy subjects, that is to say, with the aid of this study, relevant markers referred to as tumour-associated autoantigens were identified in the tissue of the patients. However, no markers for the detection of these differently expressed proteins or the tumour-associated autoantigens in the serum were provided with this study (see page 17498, column 2, penultimate paragraph).

[0012] Karen S. Anderson et al. (Journal of Proteom Research (2011) vol. 10, Nr. 1, pages 85-96) discloses the detection of autoantibodies against tumour-associated proteins with the aid of protein microarrays. The protein microarrays used here are produced in that full-length clones of the cDNAs coding for potentially tumour-associated antigens are printed onto the support, expressed and then tested comparatively with the sera of female breast cancer patients and control individuals.

[0013] US 2005/221342 A1 discloses SEQ ID. No. 538 of the present invention and generally also the use of this sequence, but not the specific application with gynaecological malignoma.

[0014] In the case of gynaecological malignomas, in particular cervical carcinoma, an early diagnosis is key for the further progression of the disease and for the prognosis.

[0015] There is thus a need for indication-specific diagnostic devices and methods for gynaecological malignoma, in particular for cervical carcinoma. The object of the present invention is to provide improved means for the early detection and therapy control in the case of gynaecological malignoma.

[0016] The invention relates to a method for identifying marker sequences for gynaecological malignoma, characterised in that
[0017] a. marker sequence candidates for gynaecological malignoma are identified in that a support, on which at least 1,000 different proteins are immobilised, is brought into contact with a serum sample from a female patient with gynaecological malignoma and proteins are identified that demonstrate an interaction with the serum (marker sequence candidates), and
[0018] b. the interaction of one or more marker sequence candidates from a. with the serum of female patients with gynaecological malignoma is determined compared with
   [0019] the interaction of the marker sequence candidate(s) from a. with the serum of female patients with benign changes and
   [0020] the interaction of the marker sequence candidate(s) from a. with the serum of healthy control individuals, and
[0021] c. marker sequences are identified in that they demonstrate an interaction with the serum from female patients with gynaecological malignoma that is different compared with the interaction with the serum from female patients with benign changes and the serum of healthy control individuals.

[0022] For example, the comparative evaluation of the data concerning the interaction from b. is performed by means of statistical analysis, for example as described in the examples.

[0023] With the aid of this method, marker sequences for gynaecological malignoma can be identified that are highly specific. Marker sequences that are found with this method on the one hand enable the early detection of gynaecological malignoma, for example of preliminary stages thereof, and on the other hand enable the distinction of gynaecological malignoma or preliminary stages thereof from benign changes. An early diagnosis and optionally a targeted treatment and also a considerably improved prognosis are thus possible. In contrast to the experiments described in the prior art by Hudson et al. (2007, above) and Anderson et al. (2011, above), marker sequences that are more specific, for example because they are also suitable for discrimination of gynaecological malignoma from non-malignant changes of the tissue (benign change), are identified with the aid of the method according to the invention. Furthermore, the marker sequences identifiable with the aid of the method according to the invention are suitable not only for testing tissue sections or biopsy material from female patients, but also for the analysis of bodily fluids, such as serum. A quick and cost-effective use or application of the marker sequences according to the invention is thus possible.

[0024] The invention also relates to the marker sequences for gynaecological malignoma identified with the method according to the invention. The invention relates to marker sequences for gynaecological malignoma obtainable by a method according to the invention and selected from the sequences comprising SEQ ID No. 1-1467 and partial sequences of SEQ ID No. 1-1467 with at least 90%, preferably 95%, of the length of the sequences SEQ ID No. 1-1467, and homologues of SEQ ID No. 1-1467 and partial sequences thereof with an identity of at least 95%, preferably 98% or more, to the corresponding nucleic acid and/or protein sequences, and sequences coded by SEQ ID No. 1-489, partial sequences thereof and homologues.

[0025] The invention also relates to an arrangement comprising one or more marker sequences according to the invention.

[0026] The invention also relates to a protein array comprising one or more marker sequences according to the invention.

[0027] The invention also relates to a diagnostic tool comprising one or more marker sequences according to the invention and optionally further additives and/or excipients.

[0028] The invention also relates to a test kit comprising one or more marker sequences according to the invention and optionally further additives and/or excipients.

[0029] The invention also relates to an arrangement according to the invention, characterised in that 2 or 3, preferably 4 or 5, particularly preferably 7 or 8 or more, different marker sequences for gynaecological malignoma are used simultaneously.

[0030] The invention also relates to a protein array according to the invention, characterised in that 2 or 3, preferably 4 or 5, particularly preferably 7 or 8 or more, different marker sequences for gynaecological malignoma are used simultaneously.

[0031] The invention also relates to a diagnostic tool according to the invention, characterised in that 2 or 3, preferably 4 or 5, particularly preferably 7 or 8 or more, different marker sequences for gynaecological malignoma are used simultaneously.

[0032] The invention also relates to a test kit according to the invention, characterised in that 2 or 3, preferably 4 or 5, particularly preferably 7 or 8 or more, different marker sequences for gynaecological malignoma are used simultaneously.

[0033] The invention also relates to the use of one or more marker sequences according to the invention, an arrangement according to the invention, a protein array according to the invention, a diagnostic tool according to the invention or a test kit according to the invention for the early detection, diagnosis, prognosis, therapy control and/or aftercare in the case of gynaecological malignoma.

[0034] The invention also relates to the use of one or more marker sequences according to the invention, an arrangement according to the invention, a protein array according to the invention, a diagnostic tool according to the invention or a test kit according to the invention for distinguishing gynaecological malignoma from benign changes.

[0035] The invention also relates to the use of one or more marker sequences according to the invention, an arrangement according to the invention, a protein array according to the invention, a diagnostic tool according to the invention or a test kit according to the invention for individualised diagnosis and/or therapy in individual patients, patient groups, cohorts, population groups, variants of gynaecological malignoma, or stages of gynaecological malignoma.

[0036] The invention also relates to the use of one or more marker sequences according to the invention, an arrangement according to the invention, a protein array according to the invention, a diagnostic tool according to the invention or a test kit according to the invention for the detection and/or for the determination of the quantity of one or more gynaecological malignoma-associated autoantibodies, for example in bodily fluid or tissue of a patient.

[0037] The invention also relates to the use of one or more marker sequences according to the invention, an arrangement according to the invention, a protein array according to the invention, a diagnostic tool according to the invention or a test kit according to the invention for the analysis of autoantibody profiles of patients, in particular for the qualitative and/or quantitative analysis of autoantibodies and/or for the monitoring of changes of autoantibody profiles, for example in bodily fluids such as serum, tissue or tissue samples from the patient.

[0038] The invention also relates to the use of one or more marker sequences according to the invention, an arrangement according to the invention, a protein array according to the invention, a diagnostic tool according to the invention or a test kit according to the invention for the screening of substances (active agents) for gynaecological malignoma.

[0039] The invention also relates to a target for the treatment and/or therapy of gynaecological malignoma, wherein the target is selected from the marker sequences SEQ ID No. 1-1467 according to the invention and partial sequences of SEQ ID No. 1-1467 with at least 90%, preferably 95%, of the length of sequences SEQ ID No. 1-1467, and homologues of SEQ ID No. 1-1467 and partial sequences thereof with an identity of at least 95%, preferably 98% or more, to the corresponding nucleic acid and/or protein sequences.

[0040] The invention also relates to a method for the early detection, diagnosis, prognosis, therapy control and/or aftercare in the case of gynaecological malignoma, wherein

a.) a marker sequence or a number of marker sequences selected from the group comprising the sequences SEQ ID No. 1-1467 and partial sequences of SEQ ID No. 1-1467 with at least 90%, preferably 95%, of the length of the sequences SEQ ID No. 1-1467, and homologues of SEQ ID No. 1-1467 and partial sequences thereof with an identity of at least 95%, preferably 98% or more, to the corresponding nucleic acid and/or protein sequences and sequences coded by SEQ ID No. 1-489, partial sequences thereof and homologues thereof is/are applied to a support,
b.) is/are brought into contact with bodily fluid or tissue sample from a patient, and
c.) an interaction of the bodily fluid or of the tissue sample with the marker sequence(s) for gynaecological malignoma from a.) is detected.

[0041] The invention relates to the use of one or more marker sequences for gynaecological malignoma for the early detection, diagnosis, prognosis and/or therapy control in the case of gynaecological malignoma, wherein the marker sequence(s) for gynaecological malignoma is/are selected from the sequences SEQ ID No. 1-978 and partial sequences of SEQ ID No. 1-978 with at least 90%, preferably at least 95%, of the length of SEQ ID No. 1-978, and homologues of SEQ ID No. 1-978 and partial sequences thereof with an identity of at least 95%, preferably at least 98% or more, to the corresponding sequences and proteins/peptides coded by the sequences SEQ ID No. 1-978, coded by the partial sequences, and the homologues and sequences coded by SEQ ID No. 1-489, partial sequences thereof and homologues thereof.

[0042] The invention relates to the use of one or more marker sequences according to the invention for gynaecological malignoma for the individualised diagnosis and/or therapy in individual patients, patient groups, cohorts, population groups, variants of gynaecological malignoma or stages of gynaecological malignoma.

[0043] The invention relates to the use of one or more marker sequences according to the invention for gynaecological malignoma for the detection and/or for the determination of the quantity of one or more gynaecological malignoma-associated autoantibodies, for example in bodily fluid or tissue of a patient.

[0044] The invention also relates to marker sequences for gynaecological malignoma selected from the sequences comprising SEQ ID No. 1-489 and partial sequences of SEQ ID No. 1-489 with at least 90%, preferably 95%, of the length of the sequences SEQ ID No. 1-489, and homologues of SEQ ID No. 1-489 and partial sequences thereof with an identity of at least 95%, preferably 98% or more, to the corresponding sequences and proteins/peptides coded by the sequences SEQ ID No. 1-489, coded by partial sequences thereof, and the corresponding homologues of these sequences.

[0045] The invention relates to an arrangement of one or more marker sequences for gynaecological malignoma on a support for the early detection, diagnosis, prognosis and/or therapy control in the case of gynaecological malignoma, wherein the marker sequence(s) for gynaecological malignoma is/are selected from groups of proteins SEQ ID No. 979 to 1467 and of proteins coded by sequences SEQ ID No. 1-978 and coded by partial sequences of SEQ ID No. 1-978 with at least 90%, preferably 95% or more, of the length of the sequences SEQ ID No. 1-978 and coded by homologues of SEQ ID No. 1-978 and partial sequences thereof with an identity of at least 95%, preferably 98% or more, to the corresponding sequences.

[0046] The invention relates to an arrangement according to the invention, wherein the marker sequence(s) for gynaecological malignoma is/are applied to a solid support, in particular a filter, a membrane, a magnetic or fluorophore-labelled bead, a silicon wafer, glass, metal, plastic, a chip, a mass spectrometry target or a matrix.

[0047] The invention relates to an arrangement according to the invention or a use according to the invention of one or more marker sequences for gynaecological malignoma, wherein the marker sequence(s) for gynaecological malignoma is/are present as clone(s).

[0048] The invention also relates to an assay or protein biochip comprising an arrangement according to the invention or one or more marker sequences according to the invention for gynaecological malignoma.

[0049] The invention also relates to a diagnostic tool (test kit) for the early detection and/or diagnosis of gynaecological malignoma and/or prognosis and/or prediction of the risk of metastasis formation in the case of gynaecological malignoma and/or for therapy monitoring and/or for aftercare in the case of gynaecological malignoma, comprising
[0050] a. an arrangement according to the invention or an assay or protein array according to the invention, or one or more marker sequences for gynaecological malignoma selected from the group comprising SEQ ID No. 1-1467 and partial sequences of SEQ ID No. 1-1467 with at least 90%, preferably 95%, of the length of the sequences SEQ ID No. 1-1467, and homologues of SEQ ID No. 1-1467 and partial sequences thereof with an identity of at least 95%, preferably 98% or more, to the corresponding nucleic acid and/or protein sequences and sequences coded by SEQ ID No. 1-489, partial sequences thereof and homologues thereof, and
[0051] b. optionally further additives and excipients.

[0052] The invention also relates to a method for identifying marker sequences for gynaecological malignoma comprising the following steps
[0053] a. providing sequences on an array,
[0054] b. identifying marker sequence candidates for gynaecological malignoma by comparative analysis of the signals measured in the event of contact of the marker sequence candidates with bodily fluid or tissue sample from a patient with gynaecological malignoma and
   [0055] bodily fluid or tissue sample from a patient without gynaecological malignoma,
[0056] c. characterising the marker sequence candidates for gynaecological malignoma with the aid of a protein array,
[0057] d. selecting marker sequences for gynaecological malignoma, which are characterised in that they deliver a different signal in the case of patients with gynaecological malignoma and patients without gynaecological malignoma (marker sequence(s) for gynaecological malignoma).

[0058] The invention relates to an arrangement of marker sequences for gynaecological malignoma on a support for the early detection, diagnosis, prognosis, and therapy control with one or more different marker sequences for gynaecological malignoma selected from the group of proteins SEQ ID No. 979 to 1467 and/or partial sequences of these proteins and/or coded by sequences SEQ ID No. 1-489 (clone sequences, cDNA) and/or coded by sequences SEQ ID. No. 490-978 (RNA sequences) and/or coded by partial sequences of SEQ ID. No. 1-978.

[0059] Within the scope of this invention, a use for the proteins SEQ ID No. 979 to 1467 and/or partial sequences of these proteins and/or proteins coded by sequences SEQ ID No. 1-489 and/or proteins coded by sequences SEQ ID. No. 490-978 and/or coded by partial sequences of SEQ ID. No. 1-978 has been found for the first time for gynaecological malignoma and has been implemented in the arrangement according to the invention. The invention thus provides a panel of marker sequences for gynaecological malignoma that can be used within the scope of individualised diagnosis and therapy in order to diagnose gynaecological malignoma and to monitor the therapy in a targeted and individually adapted manner in different patients, patient groups, cohorts, population groups, variants of gynaecological malignoma, etc.

[0060] The invention also relates to the use of a marker sequence of a number of marker sequences for gynaecological malignoma selected from the group comprising SEQ ID No. 1-1467 and partial sequences of SEQ ID No. 1-1467 with at least 90%, preferably 95%, of the length of the sequences SEQ ID No. 1-1467, and homologues of SEQ ID No. 1-1467 and partial sequences thereof with an identity of at least 95%, preferably 98% or more, to the corresponding nucleic acid and/or protein sequences, in particular proteins SEQ ID No. 979 to 1467 and/or partial sequences of these proteins and/or coded by sequences SEQ ID No. 1-489 and/or coded by sequences SEQ ID. No. 490-978 and/or coded by partial sequences of SEQ ID. No. 1-978 for diagnosis and therapy of gynaecological malignoma, in particular for the early detection of gynaecological malignoma, for the diagnosis of gynaecological malignoma, for the prognosis, for example of the risk of metastasis formation, therapy control, for example prediction and monitoring of the response to a drug or a therapy (prediction of the sensitivity or resistance), or aftercare. In particular, the invention also relates to the detection and the determination of the quantity of at least two different autoantibodies in a patient, wherein at least two different marker sequences for gynaecological malignoma according to the invention are used accordingly (as antigens).

[0061] In preferred embodiments of the invention, the arrangement/use according to the invention comprises 2 or 3, preferably 4 or 5, particularly preferably 7 or 8 or more, different marker sequences for gynaecological malignoma. The arrangement/use may comprise 9 or 10 or more marker sequences for gynaecological malignoma, for example 10 to 50, preferably 50 to 100 or more. In accordance with the invention, arrangements/uses that are produced for patients individually, for example within the scope of individualised (personalised) medicine, are also included. The invention thus also relates to an arrangement/use, wherein at least 2 to 5 or 10, preferably 30 to 50 marker sequences for gynaecological malignoma or 50 to 100 or more marker sequences for gynaecological malignoma are determined on or relative to a patient to be tested.

[0062] A preferred embodiment of the invention concerns an arrangement/use, characterised in that the marker sequences for gynaecological malignoma are applied to a solid support, in particular a filter, a membrane, a bead, for example a magnetic or fluorophore-labelled bead, a silicon wafer, glass, metal, plastic, a chip, a mass spectrometry target or a matrix. However, a filter or a bead is preferred in accordance with the invention.

[0063] Furthermore, PVDF, nitrocellulose or nylon is preferred as a filter (for example Immobilon P Millipore, Protran Whatman, Hybond N+ Amersham).

[0064] A further embodiment concerns an arrangement/use, characterised in that the marker sequences for gynaecological malignoma are present as clones.

[0065] The invention therefore relates to the use of marker sequences for gynaecological malignoma for the diagnosis of gynaecological malignoma, wherein at least one marker sequence for gynaecological malignoma of a DNA, in particular cDNA selected from the group SEQ ID No. 1-489 or RNA selected from the group 490-978 or a partial sequence or a homolog sequence thereof is determined on or relative to a patient to be tested.

[0066] The provision of marker sequences for gynaecological malignoma (also referred to as marker sequences according to the invention) allows a reliable diagnosis and stratification of patients with gynaecological malignoma, in particular by means of a protein array (also referred to as a protein biochip).

[0067] The marker sequences according to the invention for gynaecological malignoma were able to be identified by means of differential screening of samples, more specifically from healthy test subjects, with patient samples with gynaecological malignoma. Here, these marker sequences according to the invention were able to be identified for the first time by means of protein array (see the examples).

[0068] The term “gynaecological malignoma” comprises a group of diseases that can be preliminary stages of gynaecological malignoma and the establishment thereof as gynaecological malignoma. Malignant diseases of the genital tract in women, in particular malignant diseases of the cervix, such as cervical carcinoma, in particular invasive cervical carcinoma (definition for example in accordance with Pachyrembel, de Gruyter, 263^{rd} edition (2012), Berlin), are included. Variants of gynaecological malignoma and stages of gynaecological malignoma are also defined in Pschyrembel.

[0069] In a further embodiment of the invention (for example arrangement, use), the marker sequences according to the invention for gynaecological malignoma can also be combined with, supplemented or extended by known biomarkers for this indication. However, at least 50%, preferably 60%, particularly preferably 70% or more, marker sequences according to the invention are represented here, for example in the arrangement according to the invention. In particularly preferred embodiments of the invention, in particular of the arrangement according to the invention, the assay according to the invention and protein array and also the use according to the invention, at least 75%, preferably 80% or 85%, particularly preferably 90% or 95%, of marker sequences according to the invention are represented.

[0070] In a preferred embodiment, the marker sequences for gynaecological malignoma are determined outside the human body, and the determination is performed in an ex vivo/in vitro diagnosis.

[0071] The invention also relates to an assay or protein array comprising an arrangement/use according to the invention. The invention relates to a diagnostic device and/or an assay, in particular a protein array, that allows an early detection, diagnosis, prognosis, stratification and/or testing for gynaecological malignoma.

[0072] The invention also relates to the use of an arrangement according to the invention or of an assay or protein array according to the invention for the analysis of autoantibody profiles of patients, in particular for the quantitative analysis and/or for the monitoring of changes of autoantibody profiles of patients.

[0073] The invention also relates to a diagnostic tool (test kit) for the early detection and/or diagnosis of gynaecological malignoma and/or prognosis and/or prediction of the risk of metastasis formation in the case of gynaecological malignoma, for example comprising an arrangement according to the invention, preferably on a support or an assay or protein array according to the invention and optionally further additives and excipients. The invention also relates to a corresponding diagnostic tool (test kit) for therapy monitoring and/or aftercare in the case of gynaecological malignoma.

[0074] In a further embodiment of the invention, the invention relates to the use of marker sequences for gynaecological malignoma as diagnostic agents, wherein at least one marker sequence of a cDNA is selected from the group SEQ ID No. 1-489 (clone sequences) or SEQ ID No. 490-978 (RNA) or is a protein coded by SEQ ID No. 1-978 or a partial sequence or fragment thereof.

[0075] The invention also relates to a method for the early detection and diagnosis of gynaecological malignoma, wherein

a.) a marker sequence or a number of marker sequences for gynaecological malignoma selected from the group of proteins SEQ ID No. 979 to 1467 and/or partial sequences of these proteins and/or coded by sequences SEQ ID No. 1-489 and/or coded by sequences SEQ ID. No. 490-978 and/or coded by partial sequences of SEQ ID No. 1-978 is/are applied to a support and
b.) is/are brought into contact with bodily fluid or tissue sample from a patient, and
c.) an interaction of the bodily fluid or tissue sample with the marker sequences for gynaecological malignoma from a.) is detected.

[0076] The invention also relates to a method for the early detection and diagnosis of gynaecological malignoma, wherein

a.) at least one marker sequence for gynaecological malignoma of a cDNA selected from the group SEQ ID No. 1-489 (clone sequences) or SEQ ID No. 490-978 (RNA) or a partial sequence of SEQ ID. No. 1-978 is applied to a support and
b.) is brought into contact with the bodily fluid or tissue sample from a patient, and
c.) an interaction of the bodily fluid or tissue sample with the marker sequences from a.) is detected.

[0077] A particular embodiment of the invention concerns methods for the early detection and diagnosis of gynaecological malignoma, wherein the interaction according to c.) indicates a gynaecological malignoma-associated autoantibody profile of the patient or of a cohort or of a population group or of a specific disease progression (prognosis) or of a certain response to a therapy/drug.

[0078] A marker sequence of a number of marker sequences for gynaecological malignoma is/are used in a diagnosis method and/or in a diagnostic tool. In a preferred embodiment, at least 2, for example 3, 4, 5, 6, 7, 8, 9, 10, preferably 15 to 20 marker sequences or 30 to 50 or 100 or more marker sequences for gynaecological malignoma are used together or in combination, for example directly in succession or in parallel.

[0079] An interaction of the bodily fluid or of the tissue sample with the marker sequence or marker sequences for gynaecological malignoma can be detected for example by means of a probe, in particular by means of an antibody.

[0080] The invention also relates to a method for the stratification, in particular for risk stratification, or for the therapy control of a patient with gynaecological malignoma, wherein the gynaecological malignoma-associated autoantibody profile of a patient is determined and optionally monitored with the aid of one or more marker sequences for gynaecological malignoma selected from the group of proteins SEQ ID No. 979 to 1467 and/or partial sequences of these proteins and/or coded by sequences SEQ ID No. 1-489 and/or coded by sequences SEQ ID. No. 490-978 and/or coded by partial sequences of SEQ ID No. 1-978. A particular embodiment of the invention relates to the method, wherein the stratification or the therapy control comprises decisions for the treatment and therapy of the patient, in particular hospitalisation of the patient, use, efficacy and/or dosage of one or more drugs, a therapeutic measure or the monitoring of the course of a disease and the course of therapy, aetiology or classification of a disease including prognosis.

[0081] The invention also relates to a method for the stratification, in particular for the risk stratification or therapy control of a patient with gynaecological malignoma, wherein at least one marker sequence of a nucleic acid, for example cDNA selected from the group SEQ ID No. 1-489 (clone sequences) or SEQ ID No. 490-978 (RNA) or a protein coded thereby or a partial sequence of SEQ ID No. 1-978 is determined on a patient to be tested. The invention also relates to a method for the stratification, in particular for the risk stratification and/or therapy control of a patient with gynaecological malignoma, wherein at least one marker sequence of a DNA, cDNA selected from the group SEQ ID No. 1-489 (clone sequences) or SEQ ID No. 490-978 (RNA or DNA) or a partial sequence thereof is used in order to detect, to identify or to monitor gynaecological malignoma-associated autoantibodies and/or autoantibody profiles in the patient.

[0082] Autoantibody profiles comprise the quantity of one or more autoantibodies of which the occurrence/expression accompanies the development and/or establishment of gynaecological malignoma.

[0083] The stratification of patients with gynaecological malignoma in new or established sub-groups of patients with gynaecological malignoma, and the appropriate selection of patient groups for the clinical development of new therapeutic agents is also included. The term “therapy control” also includes the allocation of patients to responders and non-responders regarding a therapy or the therapy course thereof.

[0084] In the sense of this invention, “diagnosis” means the positive determination of gynaecological malignoma by means of the marker sequences for gynaecological malignoma according to the invention as well as the assignment of the patients to gynaecological malignoma. The term diagnosis includes the medical diagnostics and examinations in this regard, in particular in-vitro diagnostics and laboratory diagnostics, and also proteomics and nucleic acid blotting. Further tests may be necessary to be sure and to exclude other diseases. The term diagnosis therefore also includes the differential diagnosis of gynaecological malignoma by means of the marker sequences for gynaecological malignoma according to the invention, and the prognosis of gynaecological malignoma, in particular the prediction of the risk of metastasis formation.

[0085] In the sense of this invention, “stratification or therapy control” means that, for example, the methods according to the invention allow decisions for the treatment and therapy of the patient, whether it is the hospitalisation of the patient, the use, efficacy and/or dosage of one or more drugs, a therapeutic measure or the monitoring of the course of a disease and the course of therapy or aetiology or classification of a disease, for example into a new or existing sub-type, or the differentiation of diseases and patients thereof.

[0086] In a further embodiment of the invention, the term “stratification” in particular includes the risk stratification with the prognosis of an “outcome” of a negative health event.

[0087] “Prognosis” means the prediction of the course of a disease, for example the prediction of the relapse-free survival, the overall survival, or the risk of metastasis formation.

[0088] Within the scope of this invention, the term “patient” is understood to mean any test subject (human or mammal), with the provision that the test subject is tested for gynaecological malignoma. The term “female patient” is understood to mean any female test subject. The terms “healthy subject” or “control” or “healthy control individual” are understood to mean any test subject, preferably a female test subject, who does not have gynaecological malignoma or any benign change or in whom this cannot be detected with the known standard methods (for example see Pschyrembl, above).

[0089] The term “marker sequence for gynaecological malignoma” in the context of this invention means that that the nucleic acid, for example DNA, in particular cDNA or RNA or the amino acid sequence or the polypeptide or protein obtainable therefrom or the amino acids (protein, peptide) coded by the nucleic acids are significant (specific) for gynaecological malignoma. Marker sequences for gynaecological malignoma can be nucleic acid sequences and amino acid sequences, wherein modifications are also included.

[0090] The expression “for gynaecological malignoma” means that, for example, the cDNA or the polypeptide or protein obtainable therefrom interacts with substances from the bodily fluid or tissue sample from a patient with gynaecological malignoma (for example antigen (epitope)/antibody (paratope) interaction). These substances from the bodily fluid or tissue sample either only occur or are only expressed, or occur or are expressed at least in an intensified manner, in the case of gynaecological malignoma, whereas these substances in patients or individuals without gynaecological malignoma are not present or are only present to a smaller extent (smaller quantity, lower concentration). On the other hand, marker sequences for gynaecological malignoma can also be characterised in that they interact with substances from the bodily fluid or tissue sample from patients with gynaecological malignoma because these substances no longer occur or are no longer expressed, or occur or are expressed at least in a much lower quantity/concentration, in the case of gynaecological malignoma, whereas these substances are present to a much greater extent in patients or individuals without gynaecological malignoma. Marker sequences for gynaecological malignoma may also be present in healthy test subjects, however the quantity (concentration) thereof changes for example with the development, establishment and therapy of gynaecological malignoma. The marker sequences for gynaecological malignoma are therefore biomarkers for gynaecological malignoma. The marker sequences for gynaecological malignoma may thus indicate a profile of substances from bodily fluid and tissue sampling, for example an autoantibody profile for gynaecological malignoma.

[0091] “Autoantibody profile for gynaecological malignoma” thus includes on the one hand the composition (one or more autoantibodies) and on the other the quantity/concentration of individual autoantibodies. Here, the composition and/or the quantity or concentration are specific for gynaecological malignoma.

[0092] In a particularly preferred embodiment of the invention, the marker sequence for gynaecological malignoma is an antigen or part of an antigen or codes for an antigen or for part of an antigen.

[0093] In a particularly preferred embodiment, the marker sequence for gynaecological malignoma identifies/binds to autoantibodies that are present (intensified) during the course of the development, establishment and therapy of gynaecological malignoma or are present to a smaller extent (or are no longer present) (referred to hereinafter as “autoantibodies for gynaecological malignoma”). Autoantibodies are formed by the body against the body's own antigens, which for example are produced when gynaecological malignoma is present. Autoantibodies are formed by the body against different substances and pathogens. Within the scope of the present invention, the autoantibodies for gynaecological malignoma in particular that are formed with the occurrence of and during the course of the development of gynaecological malignoma and/or of which the expression is upregulated or downregulated are detected. Gynaecological malignoma-associated autoantibodies can be detected with the aid of the method according to the invention and marker sequences for gynaecological malignoma and are therefore used as an indication for gynaecological malignoma. The detection and the monitoring of the quantity of autoantibodies for gynaecological malignoma in the patient can be used for the early detection, diagnosis and/or therapy monitoring/therapy control. These gynaecological malignoma-associated autoantibody profiles may be sufficiently characterised already with use of a marker sequence for gynaecological malignoma. In other cases, two or more marker sequences for gynaecological malignoma are necessary in order to indicate a gynaecological malignoma-associated autoantibody profile.

[0094] In preferred embodiments of the invention, the gynaecological malignoma-associated autoantibodies can be detected using marker sequences for gynaecological malignoma, which are derived from another individual, because they originate for example from a commercial cDNA bank or can be compared with a gold standard. In other preferred embodiments of the invention, the autoantibodies for gynaecological malignoma can be detected using marker sequences for gynaecological malignoma, which are derived from the same individual (autoantigen), because they originate for example from a cDNA bank produced especially for the patient or a group of patients (for example within the scope of personalised medicine).

[0095] Autoantibodies can be formed by the patient already many years before the occurrence of the first symptoms of the disease. Early detection, diagnosis and also prognosis and (preventative) treatment would therefore be possible years before the visible outbreak of the disease. The devices and means (arrangement, array, protein biochip, diagnostic tool, test kit) and methods according to the invention thus enable a very early intervention compared with known methods, which considerably improves the prognosis and survival rates. Since the gynaecological malignoma-associated autoantibody profiles change during the establishment and treatment/therapy of gynaecological malignoma, the invention also enables the detection and the monitoring of gynaecological malignoma at any stage of development and treatment and also monitoring within the scope of aftercare in the case of gynaecological malignoma. The means according to the invention also allow easy handling, for example at home, by the patient themself and cost-effective routine precautionary measures for early detection and also aftercare.

[0096] In particular due to the use of antigens as specific marker sequence for gynaecological malignoma, which derive from sequences already known, for example from commercial cDNA banks, test subjects (individuals) can be tested, and, where applicable, gynaecological malignoma-associated autoantibodies present in these test subjects can be detected, even if the corresponding autoantigens are not (yet) known in these test subjects.

[0097] Different patients may have different gynaecological malignoma-associated autoantibody profiles, for example different cohorts or population groups differ from one another. Here, each patient may form one or more different gynaecological malignoma-associated autoantibodies during the course of the development of gynaecological malignoma and the progression of the disease of gynaecological malignoma, that is to say also different autoantibody profiles. In addition, the composition and/or the quantity of the formed gynaecological malignoma-associated autoantibodies may change during the course of the gynaecological malignoma development and progression of the disease, such that a quantitative evaluation is necessary. The therapy/treatment of gynaecological malignoma also leads to changes in the composition and/or the quantity of gynaecological malignoma-associated autoantibodies. The large selection of marker sequences for gynaecological malignoma according to the invention allows the individual compilation of marker sequences for gynaecological malignoma in an arrangement for individual patients, groups of patients, certain cohorts, population groups, etc. In an individual case, the use of a marker sequence for gynaecological malignoma may therefore be sufficient, whereas in other cases at least two or more marker sequences for gynaecological malignoma have to be used together or in combination in order to produce a meaningful autoantibody profile.

[0098] Compared with other biomarkers, the detection of gynaecological malignoma-associated autoantibodies for example in the serum/plasma has the advantage of high stability and storage capability and good detectability. The presence of autoantibodies also is not subject to a circadian rhythm, and therefore the sampling is independent of the time of day, food intake and the like.

[0099] In addition, gynaecological malignoma-associated autoantibodies can be detected with the aid of the corresponding antigens/autoantigens in known assays, such as ELISA or Western Blot, and the results can be checked for this.

[0100] In the sense of the invention, “wherein at least one marker sequence for gynaecological malignoma is selected” means that an interaction is detected. Such an interaction is, for example, a bond, in particular a binding substance on at least one marker sequence for gynaecological malignoma, or, in the case that the marker sequence for gynaecological malignoma is a nucleic acid, for example a cDNA, the hybridisation with a suitable substance under selected conditions, in particular stringent conditions (for example as defined conventionally in J. Sambrook, B. F. Fritsch, T. Maniatis (1989), Molecular cloning: A laboratory manual, 2nd Edition, Cold Spring Harbor Laboratory Press, Cold Spring Harbor, USA or Ausubel, “Current Protocols in Molecular Biology”, Green Publishing Associates and Wiley Interscience, N.Y. (1989)). One example of stringent hybridisation conditions is: hybridisation in 4×SSC at 65° C. (alternatively in 50% formamide and 4×SSC at 42° C.), followed by a number of washing steps in 0.1×SSC at 65° C. for a total of approximately one hour. An example of less stringent hybridisation conditions is hybridisation in 4×SSC at 37° C., followed by a number of washing steps in 1×SSC at room temperature.

[0101] The interaction between the bodily fluid or tissue sample from a patient and the marker sequences for gynaecological malignoma is preferably a protein-protein interaction.

[0102] In accordance with the invention, such substances, for example gynaecological malignoma-associated antigens, autoantigens, autoantibodies, are part of a bodily fluid, in particular blood, whole blood, blood plasma, blood serum, patient serum, urine, cerebrospinal fluid, synovial fluid or a tissue sample, for example from tumour tissue from the patient. The invention in particular relates to the use of these bodily fluids and tissue samples for early detection, diagnosis, prognosis, therapy control and aftercare.

[0103] However, in a further embodiment of the invention, the marker sequences for gynaecological malignoma or the substances identified from these marker sequences, for example gynaecological malignoma-associated autoantibodies, can be present in a significantly higher or lower expression rate or concentration, which is indicative of gynaecological malignoma. Here, the relative expression rates diseased/healthy of the marker sequences according to the invention for gynaecological malignoma or the substances identified from these marker sequences are determined by means of proteomics or nucleic acid blots.

[0104] The marker sequences for gynaecological malignoma, in a further embodiment of the invention, have a recognition signal that is addressed to the substance to be bound (for example antibody, nucleic acid). In accordance with the invention, the recognition signal for a protein is preferably an epitope and/or paratope and/or hapten, and for a cDNA is preferably a hybridisation or binding region.

[0105] The marker sequences for gynaecological malignoma according to the invention are detailed in Table A (RNA) and in the sequence protocol and can also be clearly identified by the respectively cited database entry (also accessible by Internet: http://www.ncbi.nlm.nih.gov/) (by means of accession no.).

[0106] The invention therefore also concerns the full-length sequences of the marker sequences for gynaecological malignoma according to the invention, more specifically as defined via the known database entry according to Table A and in the sequence protocol, referred to hereinafter as SEQ 1-1467.

[0107] Furthermore, analogue embodiments of SEQ 1-1467 to the marker sequences for gynaecological malignoma SEQ 1-1467, for example as presented in the claims, are therefore also included, since the SEQ 1-1467 according to the invention in turn constitute partial sequences, at least with high homology. However, the marker sequences for gynaecological malignoma SEQ 1-1467 are preferred in accordance with the invention.

[0108] In accordance with the invention, the marker sequences also comprise modifications of the nucleic acid sequence, in particular cDNA sequence and the corresponding amino acid sequence, such as chemical modification, such as citrullination, acetylation, phosphorylation, glycosylation or polyA strand and further modifications known as appropriate to a person skilled in the art.

[0109] The invention also relates to homologues of the marker sequences for gynaecological malignoma and homologues of the partial sequences, for example fragments of marker sequences for gynaecological malignoma. For example, homologues are nucleic acid sequences and/or protein sequences, in particular homologues of SEQ ID No. 1-1467 that have an identity with the marker sequences for gynaecological malignoma of at least 70% or 80%, preferably 90% or 95%, particularly preferably 96% or 97% or more, for example 98% or 99%. In a particularly preferred embodiment of the invention, for the case in which the marker sequences for gynaecological malignoma are antigens, the homology in the sequence range in which the antigen-antibody or antigen-autoantibody interaction takes place, is at least 95%, preferably at least 97%, particularly preferably at least 99%.

[0110] The invention also relates to partial sequences of the marker sequences for gynaecological malignoma. Partial sequences also include fragments of the marker sequences according to the invention, and partial sequences are nucleic acids or proteins/peptides that are shortened compared with the entire nucleic acid or the entire protein/peptide. Here, the deletion may occur at the end or the ends and/or within the sequence. For example, partial sequences and/or fragments that have 50 to 100 nucleotides or 70-120 nucleotides of an entire sequence are included, for example of SEQ 1-1467. Homologues of partial sequences and fragments are also included in accordance with the invention. In a particular embodiment, the marker sequences for gynaecological malignoma are shortened compared with the sequences 1-1467 to such an extent that they still consist only of the binding point(s) for the gynaecological malignoma-associated autoantibody in question. In accordance with the invention, marker sequences for gynaecological malignoma are also included that differ from the sequences SEQ ID No. 1-1467 in that they contain one or more insertions, wherein the insertions for example are 1 to 100 or more nucleotide/amino acids long, preferably 5 to 50, particularly preferably 10 to 20 nucleotides/amino acids long and the sequences are otherwise identical however or homologous to sequences 1-1467. In accordance with the invention, partial sequences that have at least 90%, preferably at least 95%, of the length of the sequences in question are preferred.

[0111] In a further embodiment, the respective marker sequence for gynaecological malignoma can be represented in different quantities in one or more regions on the support. This allows a variation of the sensitivity. The regions may each have a totality of marker sequences for gynaecological malignoma, that is to say a sufficient number of different marker sequences for gynaecological malignoma, in particular 2, 3, 4, 5, 6, 7, 8, 9 or 10 or more different and where applicable further nucleic acids and/or proteins, in particular biomarkers.

[0112] In a particularly preferred embodiment of the invention, at least 96 to 25,000 (numerically) or more different or same marker sequences for gynaecological malignoma and optionally further nucleic acids and/or proteins, in particular biomarkers, are represented on the support. Further preferably, more than 2,500, particularly preferably 10,000 or more, different or same marker sequences for gynaecological malignoma and optionally further nucleic acids and/or proteins, in particular biomarkers, are represented on the support.

[0113] Within the scope of this invention, “arrangement” is synonymous with “array”, and, if this “array” is used to identify substances on marker sequences for gynaecological malignoma, this is to be understood preferably to be an “assay” or a diagnostic device. In a preferred embodiment, the arrangement is designed such that the marker sequences for gynaecological malignoma represented on the arrangement are present in the form of a grid on a support. Furthermore, those arrangements are preferred that permit a high-density arrangement of marker sequences for gynaecological malignoma, for example protein binders. The marker sequences for gynaecological malignoma are preferably spotted. Such high-density spotted arrangements are disclosed for example in WO 99/57311 and WO 99/57312 and can be used advantageously in a robot-supported automated high-throughput method.

[0114] Within the scope of this invention, however, the term “assay” or diagnostic device likewise comprises those embodiments of a device such as ELISA, bead-based assay, line assay, Western Blot, and immunochromatographic methods (for example what are known as lateral flow immunoassays) or similar immunological single or multiplex detection methods.

[0115] A “protein array” (also referred to as a protein biochip) in the sense of this invention is the systematic arrangement of marker sequences for gynaecological malignoma on a solid support, wherein the marker sequences for gynaecological malignoma are proteins or peptides or parts thereof.

[0116] The marker sequences for gynaecological malignoma of the arrangement are fixed on a solid support, but are preferably spotted or immobilised or even printed on, that is to say applied in a reproducible manner. One or more marker sequences for gynaecological malignoma can be present multiple times in the totality of all marker sequences for gynaecological malignoma and may be present in different quantities based on a spot. Furthermore, the marker sequences for gynaecological malignoma can be standardised on the solid support (for example by means of serial dilution series of, for example, human globulins as internal calibrators for data normalisation and quantitative evaluation).

[0117] In a further embodiment, the marker sequences for gynaecological malignoma are present as clones. Such clones can be obtained for example by means of a cDNA expression library according to the invention (Bussow et al. 1998 (above)). In a preferred embodiment, such expression libraries containing clones are obtained using expression vectors from a cDNA expression library consisting of the cDNA marker sequences. These expression vectors preferably contain inducible promoters. The induction of the expression can be carried out for example by means of an inducer, such as IPTG. Suitable expression vectors are described in Terpe et al. (Terpe T Appl Microbiol Biotechnol. 2003 January; 60(5):523-33).

[0118] Expression libraries are known to a person skilled in the art; they can be produced in accordance with standard works, such as Sambrook et al, “Molecular Cloning, A laboratory handbook, 2nd edition (1989), CSH press, Cold Spring Harbor, N.Y. Expression libraries that are tissue-specific (for example human tissue, in particular human organs, for example from tissue from the ovaries and cervix) are furthermore preferable. Further, expression libraries that can be obtained by means of exon-trapping are also included in accordance with the invention. Instead of the term expression library, reference may also be made synonymously to an expression bank.

[0119] Protein arrays or corresponding expression libraries that do not exhibit any redundancy (what is known as a Uniclone® library) and that can be produced for example in accordance with the teaching of WO 99/57311 and WO 99/57312 are furthermore preferred. These preferred Uniclone® libraries have a high proportion of non-defective fully expressed proteins of a cDNA expression library.

[0120] Within the scope of this invention, the clones can also be, but are not limited to, transformed bacteria, recombinant phages or transformed cells of mammals, insects, fungi, yeasts or plants.

[0121] The clones are fixed, spotted or immobilised on a solid support. The invention therefore relates to an arrangement/use, wherein the marker sequences for gynaecological malignoma are present as clones.

[0122] In addition, the marker sequences for gynaecological malignoma can be present in the respective form in the form of a fusion protein, which for example contains at least one affinity epitope or “tag”. The tag may be or may contain one such as c-myc, his tag, arg tag, FLAG, alkaline phosphatase, VS tag, T7 tag or strep tag, HAT tag, NusA, S tag, SBP tag, thioredoxin, DsbA, a fusion protein, preferably a cellulose-binding domain, green fluorescent protein, maltose-binding protein, calmodulin-binding protein, glutathione S-transferase or lacZ.

[0123] In a further preferred embodiment of the arrangement/use according to the invention, this corresponds to a grid with the dimensions of a microtiter plate (8-12 well strips, 96 wells, 384 wells or more), a silicon wafer, a chip, a mass spectrometry target or a matrix.

[0124] In a further particularly preferred embodiment of the invention, the arrangement is located on a bead or a small plate.

[0125] In a further embodiment, the invention relates to an assay or protein array for identifying and characterising a substance (for example also referred to as a hit, lead substance, candidate, active agent) for gynaecological malignoma, characterised in that an arrangement or assay according to the invention

a.) is brought into contact with at least one substance to be tested, and
b.) binding success is detected.

[0126] The substance to be tested may be any native or non-native biomolecule, a (synthetic) chemical molecule, a natural substance, a mixture or a substance library.

[0127] Once the substance to be tested has contacted a marker sequence for gynaecological malignoma, the binding success is evaluated, and is performed for example with use of commercially available image analysing software (GenePix Pro (Axon Laboratories), Aida (Raytest), ScanArray (Packard Bioscience).

[0128] Binding according to the invention, binding success, interactions, for example protein-protein interactions (for example protein to marker sequence for gynaecological malignoma, such as antigen/antibody) or corresponding “means for detecting the binding success” can be visualised for example by means of fluorescence labelling, biotinylation, radio-isotope labelling or colloid gold or latex particle labelling in the conventional manner. Bound antibodies are detected with the aid of secondary antibodies, which are labelled using commercially available reporter molecules (for example Cy, Alexa, Dyomics, FITC or similar fluorescent dyes, colloidal gold or latex particles), or with reporter enzymes, such as alkaline phosphatase, horseradish peroxidase, etc. and the corresponding colorimetric, fluorescent or chemoluminescent substrates. A readout is performed for example by means of a microarray laser scanner, a CCD camera or visually.

[0129] In a further embodiment, the invention relates to a drug/active agent or prodrug for gynaecological malignoma developed and obtainable by the use of a marker sequence according to the invention, an arrangement according to the invention, a use according to the invention, or an assay according to the invention.

[0130] The invention also relates to the use of a marker sequence for gynaecological malignoma selected from the group of proteins SEQ ID No. 979 to 1467, partial sequences of these proteins and the sequences coding for these proteins, sequences SEQ ID No. 1-489 and SEQ ID. No. 490-978 and partial sequences of SEQ ID No 1-978 and also of proteins coded by SEQ ID No. 1-978 as affinity material for carrying out an apheresis or blood washing for patients with gynaecological malignoma. The invention thus relates to the use of the marker sequences according to the invention, preferably in the form of an arrangement, as affinity material for carrying out a blood washing in the broader sense, wherein substances from bodily fluids from a patient with gynaecological malignoma, such as blood or plasma, bind to the marker sequences according to the invention and consequently can be removed selectively from the bodily fluid.

[0131] The following examples explain the invention, but do not limit the invention to the examples.

[0132] The examples were carried out with use of the UNIarray technology platform on the basis of quantitative analyses of the autoantibody profiles in the serum of female patients with gynaecological malignoma. Gynaecological malignoma-associated antigens and gynaecological malignoma-associated autoantigens (“biomarkers”), which enable an early detection of gynaecological malignoma and/or indicate a specific form of progression (prognostic relevance), are thus to be identified systematically.

### EXAMPLE 1

[0133] Candidates for marker sequences for gynaecological malignoma were identified first.

[0134] In the first phase, 50 serum samples are tested for this purpose from female patients with gynaecological malignoma on a MACROarray (comprises approximately 10,000 different recombinant human proteins). Here, candidates for marker sequences for gynaecological malignoma are identified.

### EXAMPLE 2

[0135] In the subsequent test phase, these candidates for marker sequences for gynaecological malignoma are analysed comparatively on serum samples from 100 female patients with gynaecological malignoma and 100 female patients with benign changes or 100 healthy control female patients and characterised. As a result of this comparative analysis, marker sequences are primarily identified that interact with gynaecological malignoma-associated autoantibodies.

### EXAMPLE 3

[0136] Particularly significant biomarkers (marker sequences for gynaecological malignoma) are selected by means of bioinformatic analysis. The candidates for marker sequences for gynaecological malignoma are evaluated in terms of whether they discriminate between different test subjects (for example healthy/unhealthy)/patient groups (for example low/high risk of metastasis formation)/cohorts (for example certain past histories).

[0137] To this end, the marker sequence candidates are applied to a biochip and validated. The data evaluation is performed via statistical analyses, for example threshold value analysis, support vector machine algorithm (SVM). The sample consumption for the validation is just 50 μl/sample. In a first approach, cohorts of category I and II are selected in this way.

[0138] The biochip obtained is specific for gynaecological malignoma. This biochip comprises one or more marker sequences for gynaecological malignoma and identifies gynaecological malignoma-associated autoantibodies.

[0139] Cohort I: clinical finding: gynaecological malignoma-positive group (CASE group; verified via histopathological finding of the biopsy).

[0140] Cohort II: clinical finding: gynaecological malignoma-negative group (control group), age-matched.

[0141] Female patients are selected in accordance with inclusion and exclusion criteria

[0142] Inclusion criteria
[0143] histologically verified gynaecological malignoma
[0144] histologically verified non-neoplastic change
[0145] healthy age-matched control
[0146] at the moment of diagnosis (prior to operation)
[0147] prior to or during neoadjuvant and adjuvant anti-oestrogen therapy, adjuvant chemotherapy or adjuvant aromatase inhibitor therapy.

[0148] Exclusion criteria
[0149] age below 18 years
[0150] tumour treatment already administered

[0151] Corresponding biochips are developed for diagnosis, prediction of the course of therapy and prediction of metastasis formation.

### EXAMPLE 4

[0152] For the development of a protein biochip for the diagnosis of gynaecological malignoma, the results of the autoantibody analysis are compared with the golden standard of diagnosis and the identified marker sequences are validated (marker sequences for gynaecological malignoma). The results are then correlated with other clinical characteristics of gynaecological malignoma, for example tumour size and malignancy.

### EXAMPLE 5

[0153] With the development of a protein biochip for prediction of the course of therapy, a certain autoantibody profile or a certain signal of the protein biochip is correlated with the response of the gynaecological malignoma to a certain therapy. In addition, changes of the autoantibody profile are validated, even with regard to different treatment options (continuous time modelling).

### EXAMPLE 6

[0154] With the development of a protein biochip for the prediction of metastasis formation, marker sequences for gynaecological malignoma are selected that interact with autoantibodies for gynaecological malignoma that are suitable as indicators for metastasis formation. Due to the comparison of autoantibodies at the moment of diagnosis of female patients with and without metastasis formation, female patients who have a high metastasis risk can be identified.

[0155] Within the scope of the identification and validation of marker sequences for gynaecological malignoma, bioinformatic analyses can be performed. For each serum, reactivities against approximately 2,000 different antigens can be measured for this purpose by means of microarray. This data is used for a ranking of the spotted antigens with respect to their differentiation capability between healthy and diseased sera. This evaluation can be performed by means of the non-parametric Mann-Whitney test on normalised intensity data. For normalisation, an internal standard is used that is also spotted on each chip. Since a p-value is calculated for each antigen, methods for correction of multiple testing are used. As a very conservative approach, a Bonferroni correction is performed and in addition the less restrictive False Discovery Rate (FDR) in accordance with Benjamini & Hochberg is calculated.

[0156] Furthermore, the data is used for classification of the sera. Here, different multi-variant methods are used. These are methods from the statistical learning methods, such as Support Vector Machines (SVM), neuronal networks or classification trees, and a threshold value method, which is suitable both for classification and for visual representation of the data.

[0157] To avoid overfitting, a 10× cross-validation of the data is performed by way of example.

[0158] The sequences according to the invention are specified in the accompanying sequence protocol. (The clone sequences (cDNA) SEQ ID No. 1-489, the RNA sequences SEQ ID. No. 490-978 and the protein sequences SEQ ID No. 979-1467).

TABLE A
Data concerning marker sequences for gynaecological malignoma
(RNA) SEQ ID No. 490-978.

| SEQ | | | |
|---|---|---|---|
| ID | Accession | Alias RNA | |
| No. | No. | Accession | Blast |
| 490 | gi\|122114640 | NM_032924.3 | zinc finger protein 3 isoform |
| | | | 2 [Homo sapiens] |
| 491 | gi\|27881505 | NM_007189.1 | ATP-binding cassette sub- |
| | | | family F member 2 isoform a |
| | | | [Homo sapiens] |
| 492 | gi\|194306637 | NM_144985.3 | cadherin-24 isoform 2 [Homo |
| | | | sapiens] |
| 493 | gi\|261337182 | NM_182905.4 | WAS protein family homolog 1 |
| | | | [Homo sapiens] |
| 494 | gi\|16877437 | BC016965.1 | NLRP1 protein [Homo sapiens] |
| 495 | gi\|16332363 | NM_033489.1 | cyclin-dependent kinase 11B |
| | | | isoform 5 [Homo sapiens] |
| 496 | gi\|24797087 | NM_002617.3 | peroxisome biogenesis factor |
| | | | 10 isoform 2 [Homo sapiens] |
| 497 | gi\|51477699 | NM_001003891.1 | mediator of RNA polymerase II |
| | | | transcription subunit 15 |
| | | | isoform a [Homo sapiens] |
| 498 | gi\|215272336 | NM_018667.3 | sphingomyelin |
| | | | phosphodiesterase 3 [Homo |
| | | | sapiens] |
| 499 | gi\|39644878 | BC009967.2 | SCYL1 protein [Homo sapiens] |
| 500 | gi\|156071525 | NM_133171.3 | engulfment and cell motility |
| | | | protein 2 [Homo sapiens] |
| 501 | gi\|145553975 | NM_024657.3 | MORC family CW-type zinc |
| | | | finger protein 4 isoform a |
| | | | [Homo sapiens] |
| 502 | gi\|45387948 | NM_133368.1 | RING finger and SPRY domain- |
| | | | containing protein 1 |
| | | | precursor [Homo sapiens] |
| 503 | gi\|44681483 | NM_152562.2 | cell division cycle- |
| | | | associated protein 2 [Homo |
| | | | sapiens] |
| 504 | gi\|169216540 | XM_001717193.1 | PREDICTED: hypothetical |
| | | | protein [Homo sapiens] |
| 505 | gi\|19584557 | AL713796.1 | hypothetical protein [Homo |
| | | | sapiens] |
| 506 | gi\|55925573 | NM_203404.1 | AMP deaminase 2 isoform 3 |
| | | | [Homo sapiens] |
| 507 | gi\|7020062 | AK000158.1 | unnamed protein product [Homo |
| | | | sapiens] |
| 508 | gi\|41352717 | NM_004416.2 | protein deltex-1 [Homo |
| | | | sapiens] |
| 509 | gi\|190014575 | NM_002775.4 | serine protease HTRA1 |
| | | | precursor [Homo sapiens] |
| 510 | gi\|42544228 | NM_021138.3 | TNF receptor-associated |
| | | | factor 2 [Homo sapiens] |
| 511 | gi\|171543867 | NM_000375.2 | uroporphyrinogen-III synthase |
| | | | [Homo sapiens] |
| 512 | gi\|24307874 | NM_006955.1 | zinc finger protein 33B [Homo |
| | | | sapiens] |
| 513 | gi\|42476323 | NM_003627.4 | large neutral amino acids |
| | | | transporter small subunit 3 |
| | | | [Homo sapiens] |
| 514 | gi\|156071506 | NM_014245.3 | RING-box protein 2 isoform 1 |
| | | | [Homo sapiens] |
| 515 | gi\|44680137 | NM_152414.3 | class E basic helix-loop- |
| | | | helix protein 22 [Homo |
| | | | sapiens] |
| 516 | gi\|154759282 | NM_014603.2 | cerebellar degeneration- |
| | | | related protein 2-like [Homo |
| | | | sapiens] |
| 517 | gi\|156415993 | NM_016037.3 | probable U3 small nucleolar |
| | | | RNA-associated protein 11 |
| | | | [Homo sapiens] |
| 518 | gi\|282847377 | NM_080592.3 | apoptosis-related protein 3 |
| | | | isoform b [Homo sapiens] |
| 519 | gi\|216547614 | NM_019046.2 | ankyrin repeat domain- |
| | | | containing protein 16 isoform |
| | | | a [Homo sapiens] |
| 520 | gi\|54607103 | NM_020187.2 | chromosome 3 open reading |
| | | | frame 37 [Homo sapiens] |
| 521 | gi\|57013271 | NM_001008860.1 | magnesium transporter NIPA2 |
| | | | isoform a [Homo sapiens] |
| 522 | gi\|55770871 | NM_001007102.1 | lethal(3)malignant brain |
| | | | tumor-like protein 3 isoform |
| | | | b [Homo sapiens] |
| 523 | gi\|215599550 | NM_033201.2 | hypothetical protein LOC89927 |
| | | | isoform 1 [Homo sapiens] |
| 524 | gi\|37537683 | NM_007139.2 | zinc finger protein 92 |
| | | | isoform 1 [Homo sapiens] |
| 525 | gi\|116014343 | NM_001624.2 | absent in melanoma 1 protein |
| | | | [Homo sapiens] |
| 526 | gi\|53832030 | NM_004489.4 | G protein pathway suppressor |
| | | | 2 [Homo sapiens] |
| 527 | gi\|18765732 | NM_003081.2 | synaptosomal-associated |
| | | | protein 25 isoform SNAP25A |
| | | | [Homo sapiens] |
| 528 | gi\|195976813 | NM_007117.2 | prothyroliberin precursor |
| | | | [Homo sapiens] |
| 529 | gi\|164519060 | NM_014690.4 | hypothetical protein LOC9715 |
| | | | isoform b [Homo sapiens] |
| 530 | gi\|291327486 | NM_201569.2 | protein SMG7 isoform 4 [Homo |
| | | | sapiens] |
| 531 | gi\|40787998 | NM_012446.2 | single-stranded DNA-binding |
| | | | protein 2 [Homo sapiens] |
| 532 | gi\|28416939 | NM_016038.2 | ribosome maturation protein |
| | | | SBDS [Homo sapiens] |
| 533 | gi\|188528682 | NM_021216.4 | endothelial zinc finger |
| | | | protein induced by tumor |
| | | | necrosis factor alpha [Homo |
| | | | sapiens] |
| 534 | gi\|222080063 | NM_032478.3 | 39S ribosomal protein L38, |
| | | | mitochondrial precursor [Homo |
| | | | sapiens] |
| 535 | gi\|186910285 | NM_024570.2 | ribonuclease H2 subunit B |
| | | | isoform 1 [Homo sapiens] |
| 536 | gi\|87298934 | NM_024712.3 | engulfment and cell motility |
| | | | protein 3 [Homo sapiens] |
| 537 | gi\|300068963 | NM_031207.4 | putative hydroxypyruvate |
| | | | isomerase isoform 1 [Homo |
| | | | sapiens] |
| 538 | gi\|226437572 | NM_032360.3 | acyl-CoA-binding domain- |
| | | | containing protein 6 [Homo |
| | | | sapiens] |
| 539 | gi\|119943095 | NM_032364.5 | dnaJ homolog subfamily C |
| | | | member 14 [Homo sapiens] |
| 540 | gi\|333805595 | NM_152652.2 | zinc finger protein 48 |
| | | | isoform 1 [Homo sapiens] |
| 541 | gi\|18375500 | NM_001641.2 | DNA-(apurinic or apyrimidinic |
| | | | site) lyase [Homo sapiens] |
| 542 | gi\|214010180 | NM_001142276.1 | amyloid-like protein 2 |
| | | | isoform 2 [Homo sapiens] |
| 543 | gi\|104487001 | NM_001040712.1 | receptor-type tyrosine- |
| | | | protein phosphatase delta |
| | | | isoform 5 precursor [Homo |
| | | | sapiens] |
| 544 | gi\|32528305 | NM_002913.3 | replication factor C subunit |
| | | | 1 isoform 1 [Homo sapiens] |
| 545 | gi\|41281488 | NM_014761.2 | IST1 homolog [Homo sapiens] |
| 546 | gi\|7023276 | AK001786.1 | unnamed protein product [Homo |
| | | | sapiens] |
| 547 | gi\|217330575 | NM_007225.2 | neurexophilin-3 precursor |
| | | | [Homo sapiens] |
| 548 | gi\|163310748 | NM_001112720.1 | LIM and calponin homology |
| | | | domains-containing protein 1 |
| | | | isoform e [Homo sapiens] |
| 549 | gi\|221219021 | NM_015157.2 | pleckstrin homology-like |
| | | | domain family B member 1 |
| | | | isoform a [Homo sapiens] |
| 550 | gi\|150456423 | NM_015348.1 | transmembrane protein 131 |
| | | | [Homo sapiens] |
| 551 | gi\|62339397 | NM_014604.2 | tax1-binding protein 3 |
| | | | isoform 1 [Homo sapiens] |
| 552 | gi\|66393092 | AY995135.1 | phospholipase C epsilon 1 |
| | | | [Homo sapiens] |
| 553 | gi\|229576807 | NM_020959.2 | anoctamin-8 [Homo sapiens] |
| 554 | gi\|10863994 | NM_021188.1 | zinc finger protein 410 |
| | | | isoform b [Homo sapiens] |
| 555 | gi\|205277444 | NM_021805.2 | single Ig IL-1-related |
| | | | receptor [Homo sapiens] |
| 556 | gi\|205360980 | NM_024557.3 | protein RIC-3 isoform a [Homo |
| | | | sapiens] |
| 557 | gi\|194018548 | NM_030629.2 | C-Maf-inducing protein |
| | | | isoform Tc-mip [Homo sapiens] |
| 558 | gi\|339895851 | NM_001626.4 | RAC-beta serine/threonine- |
| | | | protein kinase isoform 1 |
| | | | [Homo sapiens] |
| 559 | gi\|148613860 | NM_015548.3 | bullous pemphigoid antigen 1 |
| | | | isoform leA precursor [Homo |
| | | | sapiens] |
| 560 | gi\|4826685 | NM_004939.1 | ATP-dependent RNA helicase |
| | | | DDX1 [Homo sapiens] |
| 561 | gi\|196115280 | NM_002055.3 | glial fibrillary acidic |
| | | | protein isoform 1 [Homo |
| | | | sapiens] |
| 562 | gi\|156104890 | NM_002096.2 | general transcription factor |
| | | | IIF subunit 1 [Homo sapiens] |
| 563 | gi\|167466172 | NM_005346.4 | heat shock 70 kDa protein |
| | | | 1A/1B [Homo sapiens] |
| 564 | gi\|212276187 | NM_002893.3 | histone-binding protein RBBP7 |
| | | | isoform 2 [Homo sapiens] |
| 565 | gi\|88853067 | NM_002911.3 | regulator of nonsense |
| | | | transcripts 1 [Homo sapiens] |
| 566 | gi\|218083729 | NM_001142684.1 | zinc finger MYM-type protein |
| | | | 5 isoform 3 [Homo sapiens] |
| 567 | gi\|219879804 | NM_006700.2 | TRAF-type zinc finger domain- |
| | | | containing protein 1 [Homo |
| | | | sapiens] |
| 568 | gi\|18379335 | NM_006711.2 | RNA-binding protein with |
| | | | serine-rich domain 1 [Homo |
| | | | sapiens] |
| 569 | gi\|68161542 | NM_007074.2 | coronin-1A [Homo sapiens] |
| 570 | gi\|110227862 | NM_016097.3 | immediate early response 3- |
| | | | interacting protein 1 [Homo |
| | | | sapiens] |
| 571 | gi\|253970487 | NM_018677.3 | acetyl-coenzyme A synthetase, |
| | | | cytoplasmic isoform 1 [Homo |
| | | | sapiens] |
| 572 | gi\|52353964 | NM_020170.3 | nicalin precursor [Homo |
| | | | sapiens] |
| 573 | gi\|116174741 | NM_020223.2 | dentin matrix protein 4 [Homo |
| | | | sapiens] |
| 574 | gi\|187761323 | NM_001127211.1 | shootin-1 isoform a [Homo |
| | | | sapiens] |
| 575 | gi\|38372934 | NM_021948.3 | brevican core protein isoform |
| | | | 1 [Homo sapiens] |
| 576 | gi\|150378519 | NM_032530.1 | zinc finger protein 594 [Homo |
| | | | sapiens] |
| 577 | gi\|81174548 | NM_001037163.1 | STAT3-interacting protein as |
| | | | a repressor [Homo sapiens] |
| 578 | gi\|83921601 | NM_001037984.1 | putative sodium-coupled |
| | | | neutral amino acid |
| | | | transporter 10 isoform a |
| | | | [Homo sapiens] |
| 579 | gi\|222831659 | NM_198475.2 | hypothetical protein |
| | | | LOC284069 precursor [Homo |
| | | | sapiens] |
| 580 | gi\|46519152 | NM_020690.4 | ANKHD1-EIF4EBP3 protein [Homo |
| | | | sapiens] |
| 581 | gi\|166362736 | NM_001114134.1 | erythrocyte membrane protein |
| | | | band 4.2 isoform 2 [Homo |
| | | | sapiens] |
| 582 | gi\|153266933 | NM_002082.3 | G protein-coupled receptor |
| | | | kinase 6 isoform B [Homo |
| | | | sapiens] |
| 583 | gi\|89903006 | NM_002084.3 | glutathione peroxidase 3 |
| | | | precursor [Homo sapiens] |
| 584 | gi\|161353442 | NM_004550.4 | NADH dehydrogenase |
| | | | [ubiquinone] iron-sulfur |
| | | | protein 2, mitochondrial |
| | | | isoform 1 precursor [Homo |
| | | | sapiens] |
| 585 | gi\|23110924 | NM_002798.1 | proteasome subunit beta type- |
| | | | 6 precursor [Homo sapiens] |
| 586 | gi\|75750485 | NM_004773.2 | zinc finger HIT domain- |
| | | | containing protein 3 [Homo |
| | | | sapiens] |
| 587 | gi\|215422360 | NM_004786.2 | thioredoxin-like protein 1 |
| | | | [Homo sapiens] |
| 588 | gi\|156071502 | NM_006694.3 | protein JTB precursor [Homo |
| | | | sapiens] |
| 589 | gi\|6996927 | NM_006792.2 | mortality factor 4 [Homo |
| | | | sapiens] |
| 590 | gi\|28373191 | NM_007002.2 | proteasomal ubiquitin |
| | | | receptor ADRM1 precursor |
| | | | [Homo sapiens] |
| 591 | gi\|33188444 | NM_012090.3 | microtubule-actin cross- |
| | | | linking factor 1 isoform a |
| | | | [Homo sapiens] |
| 592 | gi\|34147578 | NM_014338.3 | phosphatidylserine |
| | | | decarboxylase proenzyme [Homo |
| | | | sapiens] |
| 593 | gi\|24308114 | NM_015649.1 | interferon regulatory factor |
| | | | 2-binding protein 1 [Homo |
| | | | sapiens] |
| 594 | gi\|115430234 | NM_001048201.1 | E3 ubiquitin-protein ligase |
| | | | UHRF1 isoform 1 [Homo |
| | | | sapiens] |
| 595 | gi\|56676370 | NM_013291.2 | cleavage and polyadenylation |
| | | | specificity factor subunit 1 |
| | | | [Homo sapiens] |
| 596 | gi\|7706711 | NM_016538.1 | NAD-dependent deacetylase |
| | | | sirtuin-7 [Homo sapiens] |
| 597 | gi\|16554603 | NM_016070.2 | 28S ribosomal protein S23, |
| | | | mitochondrial [Homo sapiens] |
| 598 | gi\|210147465 | NM_022164.2 | tubulointerstitial nephritis |
| | | | antigen-like isoform 1 |
| | | | precursor [Homo sapiens] |
| 599 | gi\|282400941 | NM_022737.2 | lipid phosphate phosphatase- |
| | | | related protein type 2 |
| | | | isoform 1 [Homo sapiens] |
| 600 | gi\|154426254 | NM_032361.2 | THO complex subunit 3 [Homo |
| | | | sapiens] |
| 601 | gi\|34304353 | NM_183244.1 | phosphatase and actin |
| | | | regulator 3 isoform 2 [Homo |
| | | | sapiens] |
| 602 | gi\|194380673 | AK295603.1 | unnamed protein product [Homo |
| | | | sapiens] |
| 603 | gi\|66882523 | NM_001018676.1 | protein |
| | | | farnesyltransferase/geranylgeranyltransferase |
| | | | type-1 |
| | | | subunit alpha isoform b [Homo |
| | | | sapiens] |
| 604 | gi\|38788318 | NM_005275.2 | guanine nucleotide-binding |
| | | | protein-like 1 [Homo sapiens] |
| 605 | gi\|194688131 | NM_002129.3 | high mobility group protein |
| | | | B2 [Homo sapiens] |
| 606 | gi\|156119624 | NM_002215.2 | inter-alpha-trypsin inhibitor |
| | | | heavy chain H1 isoform a |
| | | | [Homo sapiens] |
| 607 | gi\|167614503 | NM_002291.2 | laminin subunit beta-1 |
| | | | precursor [Homo sapiens] |
| 608 | gi\|205277382 | NM_020998.3 | hepatocyte growth factor-like |
| | | | protein precursor [Homo |
| | | | sapiens] |
| 609 | gi\|24430150 | NM_002802.2 | 26S protease regulatory |
| | | | subunit 4 [Homo sapiens] |
| 610 | gi\|5803186 | NM_006755.1 | transaldolase [Homo sapiens] |
| 611 | gi\|31377804 | NM_003425.2 | zinc finger protein 45 [Homo |
| | | | sapiens] |
| 612 | gi\|62739174 | NM_003610.3 | mRNA export factor [Homo |
| | | | sapiens] |
| 613 | gi\|109452590 | NM_003849.2 | succinyl-CoA ligase [GDP- |
| | | | forming] subunit alpha, |
| | | | mitochondrial precursor [Homo |
| | | | sapiens] |
| 614 | gi\|187960106 | NM_003910.3 | protein BUD31 homolog [Homo |
| | | | sapiens] |
| 615 | gi\|117938253 | NM_001077441.1 | bcl-2-associated |
| | | | transcription factor 1 |
| | | | isoform 3 [Homo sapiens] |
| 616 | gi\|86788141 | NM_130442.2 | engulfment and cell motility |
| | | | protein 1 isoform 2 [Homo |
| | | | sapiens] |
| 617 | gi\|260656006 | NM_021102.3 | kunitz-type protease |
| | | | inhibitor 2 isoform a |
| | | | precursor [Homo sapiens] |
| 618 | gi\|4884170 | AL049924.1 | hypothetical protein [Homo |
| | | | sapiens] |
| 619 | gi\|194385125 | AK298842.1 | unnamed protein product [Homo |
| | | | sapiens] |
| 620 | gi\|41352716 | NM_015902.4 | E3 ubiquitin-protein ligase |
| | | | UBR5 [Homo sapiens] |
| 621 | gi\|22035561 | NM_018310.2 | transcription factor IIIB 50 kDa |
| | | | subunit [Homo sapiens] |
| 622 | gi\|122939166 | NM_019613.3 | WD repeat domain |
| | | | phosphoinositide-interacting |
| | | | protein 3 [Homo sapiens] |
| 623 | gi\|151301034 | NM_020151.3 | stAR-related lipid transfer |
| | | | protein 7, mitochondrial |
| | | | precursor [Homo sapiens] |
| 624 | gi\|20127622 | NM_024102.2 | methylosome protein 50 [Homo |
| | | | sapiens] |
| 625 | gi\|75677352 | NM_031921.4 | ATPase family AAA domain- |
| | | | containing protein 3B [Homo |
| | | | sapiens] |
| 626 | gi\|221139702 | NM_031925.2 | transmembrane protein 120A |
| | | | [Homo sapiens] |
| 627 | gi\|238550193 | NM_032298.2 | synaptotagmin-3 [Homo |
| | | | sapiens] |
| 628 | gi\|226437633 | NM_032590.4 | lysine-specific demethylase |
| | | | 2B isoform a [Homo sapiens] |
| 629 | gi\|201025403 | NM_174908.3 | coiled-coil domain-containing |
| | | | protein 50 short isoform |
| | | | [Homo sapiens] |
| 630 | gi\|34335395 | NM_032515.3 | bcl-2-related ovarian killer |
| | | | protein [Homo sapiens] |
| 631 | gi\|28872801 | NM_001212.3 | complement component 1 Q |
| | | | subcomponent-binding protein, |
| | | | mitochondrial precursor [Homo |
| | | | sapiens] |
| 632 | gi\|189339250 | NM_000387.4 | mitochondrial |
| | | | carnitine/acylcarnitine |
| | | | carrier protein [Homo |
| | | | sapiens] |
| 633 | gi\|149999367 | NM_004394.2 | death-associated protein 1 |
| | | | [Homo sapiens] |
| 634 | gi\|55956920 | NM_004499.3 | heterogeneous nuclear |
| | | | ribonucleoprotein A/B isoform |
| | | | b [Homo sapiens] |
| 635 | gi\|62632770 | NM_001015054.1 | DNA-3-methyladenine |
| | | | glycosylase isoform c [Homo |
| | | | sapiens] |
| 636 | gi\|76150622 | NM_006170.2 | putative ribosomal RNA |
| | | | methyltransferase NOP2 [Homo |
| | | | sapiens] |
| 637 | gi\|33239449 | NM_002592.2 | proliferating cell nuclear |
| | | | antigen [Homo sapiens] |
| 638 | gi\|77539056 | NM_003333.3 | ubiquitin-60S ribosomal |
| | | | protein L40 precursor [Homo |
| | | | sapiens] |
| 639 | gi\|190684674 | NM_006297.2 | DNA repair protein XRCC1 |
| | | | [Homo sapiens] |
| 640 | gi\|52630422 | NM_003581.2 | cytoplasmic protein NCK2 |
| | | | isoform A [Homo sapiens] |
| 641 | gi\|197276633 | NM_003707.2 | ruvB-like 1 [Homo sapiens] |
| 642 | gi\|226958573 | NM_004841.3 | ras GTPase-activating protein |
| | | | nGAP isoform 1 [Homo sapiens] |
| 643 | gi\|50428923 | NM_004854.3 | carbohydrate sulfotransferase |
| | | | 10 [Homo sapiens] |
| 644 | gi\|259013555 | NM_004860.3 | fragile X mental retardation |
| | | | syndrome-related protein 2 |
| | | | [Homo sapiens] |
| 645 | gi\|53729351 | NM_005112.4 | WD repeat-containing protein |
| | | | 1 isoform 2 [Homo sapiens] |
| 646 | gi\|6807758 | AL137297.1 | hypothetical protein [Homo |
| | | | sapiens] |
| 647 | gi\|14149701 | NM_015528.1 | E3 ubiquitin-protein ligase |
| | | | RNF167 precursor [Homo |
| | | | sapiens] |
| 648 | gi\|24430138 | NM_015540.2 | RNA polymerase II-associated |
| | | | protein 1 [Homo sapiens] |
| 649 | gi\|187829711 | NM_014417.3 | bcl-2-binding component 3 |
| | | | isoform 4 [Homo sapiens] |
| 650 | gi\|22547135 | NM_015956.2 | 39S ribosomal protein L4, |
| | | | mitochondrial isoform a [Homo |
| | | | sapiens] |
| 651 | gi\|187936926 | NM_014306.4 | tRNA-splicing ligase RtcB |
| | | | homolog [Homo sapiens] |
| 652 | gi\|116063563 | NM_018218.2 | ubiquitin carboxyl-terminal |
| | | | hydrolase 40 [Homo sapiens] |
| 653 | gi\|260166617 | NM_018127.6 | zinc phosphodiesterase ELAC |
| | | | protein 2 isoform 1 [Homo |
| | | | sapiens] |
| 654 | gi\|242247074 | NM_001009877.2 | bromodomain-containing |
| | | | protein 9 isoform 2 [Homo |
| | | | sapiens] |
| 655 | gi\|110349768 | NM_024296.3 | coiled-coil domain-containing |
| | | | protein 28B [Homo sapiens] |
| 656 | gi\|227500152 | NM_024333.2 | fibronectin type III and SPRY |
| | | | domain-containing protein 1 |
| | | | [Homo sapiens] |
| 657 | gi\|33337995 | AF173977.1 | MSTP107 [Homo sapiens] |
| 658 | gi\|31377666 | NM_031490.2 | lon protease homolog 2, |
| | | | peroxisomal [Homo sapiens] |
| 659 | gi\|206597512 | NM_015242.4 | arf-GAP with Rho-GAP domain, |
| | | | ANK repeat and PH domain- |
| | | | containing protein 1 isoform |
| | | | a [Homo sapiens] |
| 660 | gi\|45387954 | NM_205767.1 | protein QIL1 [Homo sapiens] |
| 661 | gi\|148596939 | NM_152383.4 | DIS3-like exonuclease 2 [Homo |
| | | | sapiens] |
| 662 | gi\|42794621 | NM_203374.1 | zinc finger protein 784 [Homo |
| | | | sapiens] |
| 663 | gi\|113424118 | XM_370711.5 | PREDICTED: similar to FRAS1 |
| | | | related extracellular matrix |
| | | | protein 2 [Homo sapiens] |
| 664 | gi\|45446741 | NM_001354.4 | aldo-keto reductase family 1 |
| | | | member C2 isoform 1 [Homo |
| | | | sapiens] |
| 665 | gi\|100913205 | NM_001357.3 | ATP-dependent RNA helicase A |
| | | | [Homo sapiens] |
| 666 | gi\|215276985 | NM_145740.3 | glutathione S-transferase A1 |
| | | | [Homo sapiens] |
| 667 | gi\|31657145 | NM_033453.2 | inosine triphosphate |
| | | | pyrophosphatase isoform a |
| | | | [Homo sapiens] |
| 668 | gi\|89276761 | NM_032940.2 | DNA-directed RNA polymerase |
| | | | II subunit RPB3 [Homo |
| | | | sapiens] |
| 669 | gi\|110618252 | NM_005035.3 | DNA-directed RNA polymerase, |
| | | | mitochondrial precursor [Homo |
| | | | sapiens] |
| 670 | gi\|42794609 | NM_002939.3 | ribonuclease inhibitor [Homo |
| | | | sapiens] |
| 671 | gi\|157266329 | NM_001033.3 | ribonucleoside-diphosphate |
| | | | reductase large subunit [Homo |
| | | | sapiens] |
| 672 | gi\|71051615 | NM_000374.3 | uroporphyrinogen |
| | | | decarboxylase [Homo sapiens] |
| 673 | gi\|45269143 | NM_012289.3 | kelch-like ECH-associated |
| | | | protein 1 [Homo sapiens] |
| 674 | gi\|194294518 | NM_001130102.1 | oxysterols receptor LXR-alpha |
| | | | isoform c [Homo sapiens] |
| 675 | gi\|7706336 | NM_016057.1 | coatomer subunit zeta-1 [Homo |
| | | | sapiens] |
| 676 | gi\|122114657 | NM_015037.2 | hypothetical protein LOC23053 |
| | | | isoform 1 [Homo sapiens] |
| 677 | gi\|150456431 | NM_001099436.1 | serine/threonine-protein |
| | | | kinase ULK3 [Homo sapiens] |
| 678 | gi\|118572609 | NM_016183.3 | mRNA turnover protein 4 |
| | | | homolog [Homo sapiens] |
| 679 | gi\|116812574 | NM_016258.2 | YTH domain family protein 2 |
| | | | isoform 1 [Homo sapiens] |
| 680 | gi\|21327682 | NM_032630.2 | cyclin-dependent kinase 2- |
| | | | interacting protein isoform 2 |
| | | | [Homo sapiens] |
| 681 | gi\|62526025 | NM_001014840.1 | protein CutA isoform 3 [Homo |
| | | | sapiens] |
| 682 | gi\|68533248 | NM_018476.3 | protein BEX1 [Homo sapiens] |
| 683 | gi\|94818878 | NM_001040457.1 | rhomboid domain-containing |
| | | | protein 2 isoform b [Homo |
| | | | sapiens] |
| 684 | gi\|83779009 | NM_024077.3 | selenocysteine insertion |
| | | | sequence-binding protein 2 |
| | | | [Homo sapiens] |
| 685 | gi\|208431768 | NM_031450.3 | basophilic leukemia expressed |
| | | | protein BLES03 isoform 2 |
| | | | [Homo sapiens] |
| 686 | gi\|32305518 | NM_031492.2 | RNA-binding protein 4B [Homo |
| | | | sapiens] |
| 687 | gi\|40317613 | NM_138777.2 | ribosome-recycling factor, |
| | | | mitochondrial isoform 1 |
| | | | precursor [Homo sapiens] |
| 688 | gi\|194473692 | NM_138340.4 | abhydrolase domain-containing |
| | | | protein 3 [Homo sapiens] |
| 689 | gi\|34304361 | NM_015102.2 | nephrocystin-4 [Homo sapiens] |
| 690 | gi\|49169840 | NM_001001795.1 | hypothetical protein |
| | | | LOC414919 [Homo sapiens] |
| 691 | gi\|89276783 | NM_001617.2 | beta-adducin isoform a [Homo |
| | | | sapiens] |
| 692 | gi\|148539875 | NM_001619.3 | beta-adrenergic receptor |
| | | | kinase 1 [Homo sapiens] |
| 693 | gi\|33591068 | NM_000386.2 | bleomycin hydrolase [Homo |
| | | | sapiens] |
| 694 | gi\|55770843 | NM_001903.2 | catenin alpha-1 [Homo |
| | | | sapiens] |
| 695 | gi\|40288196 | NM_005257.3 | transcription factor GATA-6 |
| | | | [Homo sapiens] |
| 696 | gi\|85838503 | NM_005318.3 | histone H1.0 [Homo sapiens] |
| 697 | gi\|194294499 | NM_005341.2 | zinc finger and BTB domain- |
| | | | containing protein 48 [Homo |
| | | | sapiens] |
| 698 | gi\|170014687 | NM_000414.2 | peroxisomal multifunctional |
| | | | enzyme type 2 isoform 2 [Homo |
| | | | sapiens] |
| 699 | gi\|33356546 | NM_004526.2 | DNA replication licensing |
| | | | factor MCM2 [Homo sapiens] |
| 700 | gi\|29826281 | NM_177983.1 | protein phosphatase 1G [Homo |
| | | | sapiens] |
| 701 | gi\|68216257 | NM_000981.3 | 60S ribosomal protein L19 |
| | | | [Homo sapiens] |
| 702 | gi\|197209833 | NM_005066.2 | splicing factor, proline- and |
| | | | glutamine-rich [Homo sapiens] |
| 703 | gi\|86991437 | NM_001039465.1 | serine/arginine-rich splicing |
| | | | factor 5 [Homo sapiens] |
| 704 | gi\|170014702 | NM_003023.4 | SH3 domain-binding protein 2 |
| | | | isoform a [Homo sapiens] |
| 705 | gi\|40806158 | NM_003250.4 | thyroid hormone receptor |
| | | | alpha isoform 2 [Homo |
| | | | sapiens] |
| 706 | gi\|31543803 | NM_006528.2 | tissue factor pathway |
| | | | inhibitor 2 precursor [Homo |
| | | | sapiens] |
| 707 | gi\|219842276 | NM_005439.2 | myeloid leukemia factor 2 |
| | | | [Homo sapiens] |
| 708 | gi\|201860299 | NM_003977.2 | AH receptor-interacting |
| | | | protein [Homo sapiens] |
| 709 | gi\|209862763 | NM_014806.2 | iporin [Homo sapiens] |
| 710 | gi\|124378038 | NM_014866.1 | protein transport protein |
| | | | Sec16A [Homo sapiens] |
| 711 | gi\|31652256 | NM_005461.3 | transcription factor MafB |
| | | | [Homo sapiens] |
| 712 | gi\|32307182 | NM_006379.2 | semaphorin-3C precursor [Homo |
| | | | sapiens] |
| 713 | gi\|32454736 | NM_033278.2 | tripartite motif-containing |
| | | | protein 3 [Homo sapiens] |
| 714 | gi\|260656035 | NM_006702.4 | neuropathy target esterase |
| | | | isoform b [Homo sapiens] |
| 715 | gi\|21758255 | AK098275.1 | unnamed protein product [Homo |
| | | | sapiens] |
| 716 | gi\|197313761 | NM_012137.3 | N(G),N(G)-dimethylarginine |
| | | | dimethylaminohydrolase 1 |
| | | | isoform 1 [Homo sapiens] |
| 717 | gi\|223468619 | NM_013446.3 | E3 ubiquitin-protein ligase |
| | | | makorin-1 isoform 1 [Homo |
| | | | sapiens] |
| 718 | gi\|11385647 | AF273045.1 | CTCL tumor antigen sel4-3 |
| | | | [Homo sapiens] |
| 719 | gi\|196115157 | NM_001131018.1 | cip1-interacting zinc finger |
| | | | protein isoform 4 [Homo |
| | | | sapiens] |
| 720 | gi\|55953121 | NM_015705.4 | small G protein signaling |
| | | | modulator 3 [Homo sapiens] |
| 721 | gi\|7020524 | AK000437.1 | unnamed protein product [Homo |
| | | | sapiens] |
| 722 | gi\|217035104 | NM_018198.3 | dnaJ homolog subfamily C |
| | | | member 11 [Homo sapiens] |
| 723 | gi\|34147349 | NM_024042.2 | meteorin precursor [Homo |
| | | | sapiens] |
| 724 | gi\|117320542 | NM_001077497.1 | proline-rich protein 3 |
| | | | isoform b [Homo sapiens] |
| 725 | gi\|113204623 | NM_032193.3 | ribonuclease H2 subunit C |
| | | | [Homo sapiens] |
| 726 | gi\|20270302 | NM_138769.1 | mitochondrial Rho GTPase 2 |
| | | | [Homo sapiens] |
| 727 | gi\|16445355 | NM_033415.2 | armadillo repeat containing |
| | | | protein 6 isoform 2 [Homo |
| | | | sapiens] |
| 728 | gi\|62244043 | NM_001014446.1 | OCIA domain-containing |
| | | | protein 2 isoform 1 [Homo |
| | | | sapiens] |
| 729 | gi\|333609247 | NM_153269.2 | hypothetical protein |
| | | | LOC140680 isoform 1 [Homo |
| | | | sapiens] |
| 730 | gi\|21389514 | NM_144726.1 | RING finger protein 145 |
| | | | isoform 2 [Homo sapiens] |
| 731 | gi\|197276595 | NM_006129.3 | bone morphogenetic protein 1 |
| | | | isoform 3 precursor [Homo |
| | | | sapiens] |
| 732 | gi\|169790898 | NM_001122630.1 | cyclin-dependent kinase |
| | | | inhibitor 1C isoform b [Homo |
| | | | sapiens] |
| 733 | gi\|66346646 | NM_001908.3 | cathepsin B preproprotein |
| | | | [Homo sapiens] |
| 734 | gi\|38201713 | NM_001419.2 | ELAV-like protein 1 [Homo |
| | | | sapiens] |
| 735 | gi\|46411186 | NM_005234.3 | nuclear receptor subfamily 2 |
| | | | group F member 6 [Homo |
| | | | sapiens] |
| 736 | gi\|167000329 | NM_021903.2 | gamma-aminobutyric acid type |
| | | | B receptor subunit 1 isoform |
| | | | b precursor [Homo sapiens] |
| 737 | gi\|27502382 | NM_172316.1 | homeobox protein Meis2 |
| | | | isoform h [Homo sapiens] |
| 738 | gi\|51317374 | NM_005008.2 | NHP2-like protein 1 [Homo |
| | | | sapiens] |
| 739 | gi\|20072756 | BC027470.1 | PCDHGC3 protein [Homo |
| | | | sapiens] |
| 740 | gi\|25777611 | NM_002809.2 | 26S proteasome non-ATPase |
| | | | regulatory subunit 3 [Homo |
| | | | sapiens] |
| 741 | gi\|125987582 | NM_080840.2 | receptor-type tyrosine- |
| | | | protein phosphatase alpha |
| | | | isoform 2 precursor [Homo |
| | | | sapiens] |
| 742 | gi\|21536317 | NM_006268.3 | zinc finger protein ubi-d4 |
| | | | [Homo sapiens] |
| 743 | gi\|194306565 | NM_007370.4 | replication factor C subunit |
| | | | 5 isoform 1 [Homo sapiens] |
| 744 | gi\|55925647 | NM_000994.3 | 60S ribosomal protein L32 |
| | | | [Homo sapiens] |
| 745 | gi\|42476326 | NM_003025.2 | endophilin-A2 isoform 1 [Homo |
| | | | sapiens] |
| 746 | gi\|56699493 | NM_003179.2 | synaptophysin [Homo sapiens] |
| 747 | gi\|83281440 | NM_003755.3 | eukaryotic translation |
| | | | initiation factor 3 subunit G |
| | | | [Homo sapiens] |
| 748 | gi\|331284175 | NM_001077261.3 | nuclear receptor corepressor |
| | | | 2 isoform 2 [Homo sapiens] |
| 749 | gi\|33519473 | NM_005831.3 | calcium-binding and coiled- |
| | | | coil domain-containing |
| | | | protein 2 [Homo sapiens] |
| 750 | gi\|40068460 | NM_007284.3 | twinfilin-2 [Homo sapiens] |
| 751 | gi\|19913459 | BC026067.1 | WDSOF1 protein [Homo sapiens] |
| 752 | gi\|155030235 | NM_001100412.1 | ribonuclease 3 isoform 2 |
| | | | [Homo sapiens] |
| 753 | gi\|46370087 | NM_13306.3 | sorting nexin-15 isoform A |
| | | | [Homo sapiens] |
| 754 | gi\|109134346 | NM_001042399.1 | coiled-coil domain-containing |
| | | | protein 41 [Homo sapiens] |
| 755 | gi\|50409706 | NM_016638.2 | ADP-ribosylation factor-like |
| | | | protein 6-interacting protein |
| | | | 4 isoform 2 [Homo sapiens] |
| 756 | gi\|19913437 | NM_015994.2 | V-type proton ATPase subunit |
| | | | D [Homo sapiens] |
| 757 | gi\|85362736 | NM_001039140.1 | hypothetical protein LOC54976 |
| | | | [Homo sapiens] |
| 758 | gi\|21750404 | AK091925.1 | unnamed protein product [Homo |
| | | | sapiens] |
| 759 | gi\|157388940 | NM_017998.2 | hypothetical protein LOC55071 |
| | | | [Homo sapiens] |
| 760 | gi\|189095252 | NM_001080425.2 | protein BEX4 [Homo sapiens] |
| 761 | gi\|46559760 | NM_032512.2 | PDZ domain-containing protein |
| | | | 4 [Homo sapiens] |
| 762 | gi\|198041727 | NM_001134774.1 | kinesin light chain 2 isoform |
| | | | 2 [Homo sapiens] |
| 763 | gi\|55749441 | NM_001006935.1 | transcription elongation |
| | | | factor A protein-like 4 [Homo |
| | | | sapiens] |
| 764 | gi\|18027791 | AF318350.1 | unknown [Homo sapiens] |
| 765 | gi\|116235475 | NM_032856.2 | WD repeat-containing protein |
| | | | 73 [Homo sapiens] |
| 766 | gi\|91176336 | NM_138383.2 | MTSS1-like protein [Homo |
| | | | sapiens] |
| 767 | gi\|156523245 | NM_145239.2 | proline-rich transmembrane |
| | | | protein 2 [Homo sapiens] |
| 768 | gi\|209571529 | NM_182527.2 | calcium-binding protein 7 |
| | | | [Homo sapiens] |
| 769 | gi\|195947381 | NM_178314.3 | RILP-like protein 1 [Homo |
| | | | sapiens] |
| 770 | gi\|34147601 | NM_004309.3 | rho GDP-dissociation |
| | | | inhibitor 1 isoform a [Homo |
| | | | sapiens] |
| 771 | gi\|23110949 | NM_001909.3 | cathepsin D preproprotein |
| | | | [Homo sapiens] |
| 772 | gi\|168480109 | NM_005225.2 | transcription factor E2F1 |
| | | | [Homo sapiens] |
| 773 | gi\|188497702 | NM_004186.3 | semaphorin-3F precursor [Homo |
| | | | sapiens] |
| 774 | gi\|109150415 | NM_012293.1 | peroxidasin homolog precursor |
| | | | [Homo sapiens] |
| 775 | gi\|115430228 | NM_005132.2 | meiotic recombination protein |
| | | | REC8 homolog [Homo sapiens] |
| 776 | gi\|24497575 | NM_006066.2 | alcohol dehydrogenase [NADP+] |
| | | | [Homo sapiens] |
| 777 | gi\|5453837 | NM_006396.1 | Sjoegren syndrome/scleroderma |
| | | | autoantigen 1 [Homo sapiens] |
| 778 | gi\|6005793 | NM_007213.1 | PRA1 family protein 2 [Homo |
| | | | sapiens] |
| 779 | gi\|209870093 | NM_012437.4 | SNARE-associated protein |
| | | | Snapin [Homo sapiens] |
| 780 | gi\|148664189 | NM_014333.3 | cell adhesion molecule 1 |
| | | | isoform 1 [Homo sapiens] |
| 781 | gi\|18496982 | NM_015526.1 | CAP-Gly domain-containing |
| | | | linker protein 3 [Homo |
| | | | sapiens] |
| 782 | gi\|238624145 | NM_017455.3 | neuroplastin isoform a |
| | | | precursor [Homo sapiens] |
| 783 | gi\|148833501 | NM_016403.3 | protein CWC15 homolog [Homo |
| | | | sapiens] |
| 784 | gi\|10438635 | AK025958.1 | unnamed protein product [Homo |
| | | | sapiens] |
| 785 | gi\|58761526 | NM_018181.4 | zinc finger protein 532 [Homo |
| | | | sapiens] |
| 786 | gi\|8922734 | NM_018255.1 | elongator complex protein 2 |
| | | | isoform 2 [Homo sapiens] |
| 787 | gi\|41327716 | NM_022104.3 | phosphorylated CTD- |
| | | | interacting factor 1 [Homo |
| | | | sapiens] |
| 788 | gi\|40068484 | NM_022834.3 | von Willebrand factor A |
| | | | domain-containing protein 1 |
| | | | isoform 1 precursor [Homo |
| | | | sapiens] |
| 789 | gi\|215820629 | NM_032355.3 | vacuolar fusion protein MON1 |
| | | | homolog A isoform a [Homo |
| | | | sapiens] |
| 790 | gi\|126090574 | NM_001039503.2 | serine protease 53 precursor |
| | | | [Homo sapiens] |
| 791 | gi\|24307878 | NM_001378.1 | cytoplasmic dynein 1 |
| | | | intermediate chain 2 [Homo |
| | | | sapiens] |
| 792 | gi\|153791534 | NM_021078.2 | histone acetyltransferase |
| | | | KAT2A [Homo sapiens] |
| 793 | gi\|73747843 | NM_002311.3 | DNA ligase 3 isoform beta |
| | | | precursor [Homo sapiens] |
| 794 | gi\|38045911 | NM_000269.2 | nucleoside diphosphate kinase |
| | | | A isoform b [Homo sapiens] |
| 795 | gi\|219879812 | NM_002696.2 | DNA-directed RNA polymerase |
| | | | II subunit RPB7 [Homo |
| | | | sapiens] |
| 796 | gi\|56790298 | NM_002779.3 | PH and SEC7 domain-containing |
| | | | protein 1 [Homo sapiens] |
| 797 | gi\|21359853 | NM_004582.2 | geranylgeranyl transferase |
| | | | type-2 subunit beta [Homo |
| | | | sapiens] |
| 798 | gi\|194394229 | NM_003313.3 | GDP-L-fucose synthase [Homo |
| | | | sapiens] |
| 799 | gi\|221136767 | NM_000371.3 | transthyretin precursor [Homo |
| | | | sapiens] |
| 800 | gi\|193211615 | NM_003634.2 | protein NipSnap homolog 1 |
| | | | isoform 1 [Homo sapiens] |
| 801 | gi\|21396488 | NM_004793.2 | lon protease homolog, |
| | | | mitochondrial precursor [Homo |
| | | | sapiens] |
| 802 | gi\|24234719 | NM_005494.2 | dnaJ homolog subfamily B |
| | | | member 6 isoform b [Homo |
| | | | sapiens] |
| 803 | gi\|86792514 | NM_005700.3 | dipeptidyl peptidase 3 [Homo |
| | | | sapiens] |
| 804 | gi\|34335235 | NM_006651.3 | complexin-1 [Homo sapiens] |
| 805 | gi\|116805324 | NM_170713.2 | ras association domain- |
| | | | containing protein 1 isoform |
| | | | C [Homo sapiens] |
| 806 | gi\|114796625 | NM_013356.2 | monocarboxylate transporter 3 |
| | | | [Homo sapiens] |
| 807 | gi\|95089415 | NM_012478.3 | WW domain-binding protein 2 |
| | | | [Homo sapiens] |
| 808 | gi\|51094102 | NM_019082.2 | probable ATP-dependent RNA |
| | | | helicase DDX56 [Homo sapiens] |
| 809 | gi\|33859677 | NM_017879.1 | zinc finger protein 416 [Homo |
| | | | sapiens] |
| 810 | gi\|24432025 | NM_032775.2 | kelch-like protein 22 [Homo |
| | | | sapiens] |
| 811 | gi\|126273571 | NM_144586.5 | ly6/PLAUR domain-containing |
| | | | protein 1 isoform a [Homo |
| | | | sapiens] |
| 812 | gi\|149363677 | NM_199287.2 | coiled-coil domain-containing |
| | | | protein 137 [Homo sapiens] |
| 813 | gi\|148763344 | NM_033529.2 | cyclin-dependent kinase 11A |
| | | | isoform 4 [Homo sapiens] |
| 814 | gi\|38372924 | NM_198589.1 | basigin isoform 2 precursor |
| | | | [Homo sapiens] |
| 815 | gi\|40804467 | NM_000723.3 | voltage-dependent L-type |
| | | | calcium channel subunit beta- |
| | | | 1 isoform 1 [Homo sapiens] |
| 816 | gi\|40549399 | NM_001894.4 | casein kinase I isoform |
| | | | epsilon [Homo sapiens] |
| 817 | gi\|34486089 | NM_004152.2 | ornithine decarboxylase |
| | | | antizyme 1 [Homo sapiens] |
| 818 | gi\|189458830 | NM_002880.3 | RAF proto-oncogene |
| | | | serine/threonine-protein |
| | | | kinase [Homo sapiens] |
| 819 | gi\|71164880 | NM_001011.3 | 40S ribosomal protein S7 |
| | | | [Homo sapiens] |
| 820 | gi\|71164876 | NM_001014.3 | 40S ribosomal protein S10 |
| | | | [Homo sapiens] |
| 821 | gi\|48255969 | NM_002969.3 | mitogen-activated protein |
| | | | kinase 12 [Homo sapiens] |
| 822 | gi\|56117849 | NM_007158.4 | cold shock domain-containing |
| | | | protein E1 isoform 2 [Homo |
| | | | sapiens] |
| 823 | gi\|149158693 | NM_080702.2 | large proline-rich protein |
| | | | BAG6 isoform b [Homo sapiens] |
| 824 | gi\|75992939 | NM_004651.3 | ubiquitin carboxyl-terminal |
| | | | hydrolase 11 [Homo sapiens] |
| 825 | gi\|156071485 | NM_003680.3 | tyrosyl-tRNA synthetase, |
| | | | cytoplasmic [Homo sapiens] |
| 826 | gi\|195972858 | NM_004228.5 | cytohesin-2 isoform 2 [Homo |
| | | | sapiens] |
| 827 | gi\|49472826 | NM_006324.2 | craniofacial development |
| | | | protein 1 [Homo sapiens] |
| 828 | gi\|61744459 | NM_017588.2 | WD repeat-containing protein |
| | | | 5 [Homo sapiens] |
| 829 | gi\|31543548 | NM_007273.3 | prohibitin-2 isoform 2 [Homo |
| | | | sapiens] |
| 830 | gi\|27374999 | NM_007285.6 | gamma-aminobutyric acid |
| | | | receptor-associated protein- |
| | | | like 2 [Homo sapiens] |
| 831 | gi\|38146101 | NM_013274.2 | DNA polymerase lambda isoform |
| | | | a [Homo sapiens] |
| 832 | gi\|171906572 | NM_014063.6 | drebrin-like protein isoform |
| | | | a [Homo sapiens] |
| 833 | gi\|17978480 | NM_080413.1 | vacuolar protein sorting- |
| | | | associated protein 16 homolog |
| | | | isoform 3 [Homo sapiens] |
| 834 | gi\|34147350 | NM_023940.2 | ras-like protein family |
| | | | member 11B [Homo sapiens] |
| 835 | gi\|190194415 | NM_024326.3 | F-box/LRR-repeat protein 15 |
| | | | [Homo sapiens] |
| 836 | gi\|16604251 | NM_052860.1 | zinc finger protein 300 |
| | | | isoform 2 [Homo sapiens] |
| 837 | gi\|115511029 | NM_138441.2 | protein MB21D1 [Homo sapiens] |
| 838 | gi\|23510412 | NM_052948.2 | rho GTPase-activating protein |
| | | | 33 isoform 1 [Homo sapiens] |
| 839 | gi\|223890145 | NM_182498.3 | zinc finger protein 428 [Homo |
| | | | sapiens] |
| 840 | gi\|58761495 | NM_001011724.1 | heterogeneous nuclear |
| | | | ribonucleoprotein A1-like 2 |
| | | | [Homo sapiens] |
| 841 | gi\|34530768 | AK124865.1 | unnamed protein product [Homo |
| | | | sapiens] |
| 842 | gi\|197100212 | NM_001610.2 | lysosomal acid phosphatase |
| | | | isoform 1 precursor [Homo |
| | | | sapiens] |
| 843 | gi\|34452697 | NM_004924.3 | alpha-actinin-4 [Homo |
| | | | sapiens] |
| 844 | gi\|17017985 | NM_001861.2 | cytochrome c oxidase subunit |
| | | | 4 isoform 1, mitochondrial |
| | | | precursor [Homo sapiens] |
| 845 | gi\|197245333 | NM_005273.3 | guanine nucleotide-binding |
| | | | protein G(I)/G(S)/G(T) |
| | | | subunit beta-2 [Homo sapiens] |
| 846 | gi\|21071025 | NM_005319.3 | histone H1.2 [Homo sapiens] |
| 847 | gi\|188497749 | NM_033500.2 | hexokinase-1 isoform HKI-td |
| | | | [Homo sapiens] |
| 848 | gi\|250083 | S37374.1 | HSJ1b [Homo sapiens] |
| 849 | gi\|219842228 | NM_004537.4 | nucleosome assembly protein |
| | | | 1-like 1 [Homo sapiens] |
| 850 | gi\|45439320 | NM_005038.2 | peptidyl-prolyl cis-trans |
| | | | isomerase D [Homo sapiens] |
| 851 | gi\|207029438 | NM_001135256.1 | histone-binding protein RBBP4 |
| | | | isoform c [Homo sapiens] |
| 852 | gi\|171543894 | NM_002973.3 | ataxin-2 [Homo sapiens] |
| 853 | gi\|51477701 | NM_001003801.1 | SWI/SNF-related matrix- |
| | | | associated actin-dependent |
| | | | regulator of chromatin |
| | | | subfamily D member 3 isoform |
| | | | 2 [Homo sapiens] |
| 854 | gi\|54607088 | NM_001005914.1 | semaphorin-3B isoform 2 |
| | | | precursor [Homo sapiens] |
| 855 | gi\|215820638 | NM_014714.3 | intraflagellar transport |
| | | | protein 140 homolog [Homo |
| | | | sapiens] |
| 856 | gi\|45643136 | NM_006791.2 | mortality factor 4-like |
| | | | protein 1 isoform 1 [Homo |
| | | | sapiens] |
| 857 | gi\|115511037 | NM_001009955.2 | single-stranded DNA-binding |
| | | | protein 3 isoform c [Homo |
| | | | sapiens] |
| 858 | gi\|194248096 | NM_013333.3 | epsin-1 isoform c [Homo |
| | | | sapiens] |
| 859 | gi\|223941871 | NM_017825.2 | poly(ADP-ribose) |
| | | | glycohydrolase ARH3 [Homo |
| | | | sapiens] |
| 860 | gi\|268370292 | NM_020442.4 | valyl-tRNA synthetase, |
| | | | mitochondrial isoform 2 |
| | | | precursor [Homo sapiens] |
| 861 | gi\|53831987 | NM_020659.2 | protein tweety homolog 1 |
| | | | isoform 1 [Homo sapiens] |
| 862 | gi\|165932369 | NM_024582.4 | protocadherin Fat 4 precursor |
| | | | [Homo sapiens] |
| 863 | gi\|52145308 | NM_032808.5 | leucine-rich repeat neuronal |
| | | | 6A [Homo sapiens] |
| 864 | gi\|150417982 | NM_001606.4 | ATP-binding cassette sub- |
| | | | family A member 2 isoform a |
| | | | [Homo sapiens] |
| 865 | gi\|71565153 | NM_000671.3 | alcohol dehydrogenase class-3 |
| | | | [Homo sapiens] |
| 866 | gi\|156523967 | NM_001618.3 | poly [ADP-ribose] polymerase |
| | | | 1 [Homo sapiens] |
| 867 | gi\|49249971 | NM_152296.3 | sodium/potassium-transporting |
| | | | ATPase subunit alpha-3 [Homo |
| | | | sapiens] |
| 868 | gi\|82546842 | NM_004327.3 | breakpoint cluster region |
| | | | protein isoform 1 [Homo |
| | | | sapiens] |
| 869 | gi\|20149593 | NM_007355.2 | heat shock protein HSP 90- |
| | | | beta [Homo sapiens] |
| 870 | gi\|27436949 | NM_005573.2 | lamin-B1 isoform 1 [Homo |
| | | | sapiens] |
| 871 | gi\|61742795 | NM_005581.3 | basal cell adhesion molecule |
| | | | isoform 1 precursor [Homo |
| | | | sapiens] |
| 872 | gi\|121256637 | NM_000918.3 | protein disulfide-isomerase |
| | | | precursor [Homo sapiens] |
| 873 | gi\|209529732 | NM_139032.2 | mitogen-activated protein |
| | | | kinase 7 isoform 2 [Homo |
| | | | sapiens] |
| 874 | gi\|257196241 | NM_001063.3 | serotransferrin precursor |
| | | | [Homo sapiens] |
| 875 | gi\|124028528 | NM_004819.2 | symplekin [Homo sapiens] |
| 876 | gi\|253735771 | NM_004723.3 | rho guanine nucleotide |
| | | | exchange factor 2 isoform 3 |
| | | | [Homo sapiens] |
| 877 | gi\|115298667 | NM_004814.2 | U5 small nuclear |
| | | | ribonucleoprotein 40 kDa |
| | | | protein [Homo sapiens] |
| 878 | gi\|148922919 | NM_014856.2 | DENN domain-containing |
| | | | protein 4B [Homo sapiens] |
| 879 | gi\|222080097 | NM_017450.2 | brain-specific angiogenesis |
| | | | inhibitor 1-associated |
| | | | protein 2 isoform 1 [Homo |
| | | | sapiens] |
| 880 | gi\|38455426 | NM_006430.2 | T-complex protein 1 subunit |
| | | | delta [Homo sapiens] |
| 881 | gi\|300192932 | NM_006796.2 | AFG3-like protein 2 [Homo |
| | | | sapiens] |
| 882 | gi\|166795249 | NM_006845.3 | kinesin-like protein KIF2C |
| | | | [Homo sapiens] |
| 883 | gi\|21396479 | NM_007367.2 | RNA-binding protein Raly |
| | | | short isoform [Homo sapiens] |
| 884 | gi\|150010638 | NM_015276.1 | ubiquitin carboxyl-terminal |
| | | | hydrolase 22 [Homo sapiens] |
| 885 | gi\|82659108 | NM_020765.2 | E3 ubiquitin-protein ligase |
| | | | UBR4 [Homo sapiens] |
| 886 | gi\|151101234 | NM_012461.2 | TERF1-interacting nuclear |
| | | | factor 2 isoform 2 [Homo |
| | | | sapiens] |
| 887 | gi\|134284354 | NM_012336.3 | nuclear prelamin A |
| | | | recognition factor isoform a |
| | | | [Homo sapiens] |
| 888 | gi\|50726984 | NM_016337.2 | ena/VASP-like protein [Homo |
| | | | sapiens] |
| 889 | gi\|37622893 | NM_194460.1 | RING finger protein 126 [Homo |
| | | | sapiens] |
| 890 | gi\|20521787 | AB033013.2 | KIAA1187 protein [Homo |
| | | | sapiens] |
| 891 | gi\|112789552 | NM_020820.3 | phosphatidylinositol 3,4,5- |
| | | | trisphosphate-dependent Rac |
| | | | exchanger 1 protein [Homo |
| | | | sapiens] |
| 892 | gi\|224549001 | NM_032905.4 | splicing factor 45 [Homo |
| | | | sapiens] |
| 893 | gi\|209862908 | NM_001136053.1 | transmembrane protein |
| | | | adipocyte-associated 1 |
| | | | isoform 1 [Homo sapiens] |
| 894 | gi\|197102773 | NM_007099.3 | low molecular weight |
| | | | phosphotyrosine protein |
| | | | phosphatase isoform b [Homo |
| | | | sapiens] |
| 895 | gi\|239937553 | NM_000687.2 | adenosylhomocysteinase |
| | | | isoform 1 [Homo sapiens] |
| 896 | gi\|18201904 | NM_000175.2 | glucose-6-phosphate isomerase |
| | | | isoform 2 [Homo sapiens] |
| 897 | gi\|169259765 | NM_001514.5 | transcription initiation |
| | | | factor IIB [Homo sapiens] |
| 898 | gi\|187761305 | NM_002134.3 | heme oxygenase 2 [Homo |
| | | | sapiens] |
| 899 | gi\|10434001 | AK022548.1 | unnamed protein product [Homo |
| | | | sapiens] |
| 900 | gi\|24797084 | NM_002265.4 | importin subunit beta-1 [Homo |
| | | | sapiens] |
| 901 | gi\|156631004 | NM_002812.4 | 26S proteasome non-ATPase |
| | | | regulatory subunit 8 [Homo |
| | | | sapiens] |
| 902 | gi\|154759258 | NM_003127.2 | spectrin alpha chain, brain |
| | | | isoform 2 [Homo sapiens] |
| 903 | gi\|38505154 | NM_003195.4 | transcription elongation |
| | | | factor A protein 2 isoform a |
| | | | [Homo sapiens] |
| 904 | gi\|141801911 | NM_003295.2 | translationally-controlled |
| | | | tumor protein [Homo sapiens] |
| 905 | gi\|21396499 | NM_003609.2 | HIRA-interacting protein 3 |
| | | | [Homo sapiens] |
| 906 | gi\|83367070 | NM_003753.3 | eukaryotic translation |
| | | | initiation factor 3 subunit D |
| | | | [Homo sapiens] |
| 907 | gi\|83367079 | NM_003801.3 | glycosylphosphatidylinositol |
| | | | anchor attachment 1 protein |
| | | | [Homo sapiens] |
| 908 | gi\|33469915 | NM_003906.3 | 80 kDa MCM3-associated |
| | | | protein [Homo sapiens] |
| 909 | gi\|52486264 | NM_006029.4 | paraneoplastic antigen Ma1 |
| | | | [Homo sapiens] |
| 910 | gi\|34365370 | BX641004.1 | hypothetical protein [Homo |
| | | | sapiens] |
| 911 | gi\|215490016 | NM_012286.2 | mortality factor 4-like |
| | | | protein 2 [Homo sapiens] |
| 912 | gi\|148727367 | NM_015695.2 | bromodomain and PHD finger- |
| | | | containing protein 3 [Homo |
| | | | sapiens] |
| 913 | gi\|193788635 | NM_032687.3 | cysteine and histidine-rich |
| | | | protein 1 isoform 2 [Homo |
| | | | sapiens] |
| 914 | gi\|50345274 | NM_016185.2 | hematological and |
| | | | neurological expressed 1 |
| | | | protein isoform 1 [Homo |
| | | | sapiens] |
| 915 | gi\|56788357 | NM_020243.4 | mitochondrial import receptor |
| | | | subunit TOM22 homolog [Homo |
| | | | sapiens] |
| 916 | gi\|32455272 | NM_006648.3 | serine/threonine-protein |
| | | | kinase WNK2 [Homo sapiens] |
| 917 | gi\|119964727 | NM_152783.3 | D-2-hydroxyglutarate |
| | | | dehydrogenase, mitochondrial |
| | | | precursor [Homo sapiens] |
| 918 | gi\|114520614 | NM_001954.4 | epithelial discoidin domain- |
| | | | containing receptor 1 isoform |
| | | | 1 precursor [Homo sapiens] |
| 919 | gi\|62241006 | NM_001888.2 | mu-crystallin homolog isoform |
| | | | 1 [Homo sapiens] |
| 920 | gi\|206725516 | NM_000801.3 | peptidyl-prolyl cis-trans |
| | | | isomerase FKBP1A isoform a |
| | | | [Homo sapiens] |
| 921 | gi\|4505488 | NM_002539.1 | ornithine decarboxylase [Homo |
| | | | sapiens] |
| 922 | gi\|38679891 | NM_006223.2 | peptidyl-prolyl cis-trans |
| | | | isomerase NIMA-interacting 4 |
| | | | isoform 1 [Homo sapiens] |
| 923 | gi\|194018536 | NM_002766.2 | phosphoribosyl pyrophosphate |
| | | | synthase-associated protein 1 |
| | | | [Homo sapiens] |
| 924 | gi\|78217389 | NM_001004.3 | 60S acidic ribosomal protein |
| | | | P2 [Homo sapiens] |
| 925 | gi\|197927095 | NM_001030.4 | 40S ribosomal protein S27 |
| | | | [Homo sapiens] |
| 926 | gi\|54792063 | NM_003352.4 | small ubiquitin-related |
| | | | modifier 1 isoform a |
| | | | precursor [Homo sapiens] |
| 927 | gi\|31083149 | NM_003502.2 | axin-1 isoform a [Homo |
| | | | sapiens] |
| 928 | gi\|153792767 | NM_021195.4 | claudin-6 [Homo sapiens] |
| 929 | gi\|151108508 | NM_014859.4 | rho GTPase-activating protein |
| | | | 44 [Homo sapiens] |
| 930 | gi\|22907051 | NM_006409.2 | actin-related protein 2/3 |
| | | | complex subunit 1A isoform 1 |
| | | | [Homo sapiens] |
| 931 | gi\|54112115 | NM_006802.2 | splicing factor 3A subunit 3 |
| | | | [Homo sapiens] |
| 932 | gi\|209413761 | NM_017586.2 | calcium channel flower |
| | | | homolog isoform a [Homo |
| | | | sapiens] |
| 933 | gi\|209954817 | NM_014921.4 | latrophilin-1 isoform 2 |
| | | | precursor [Homo sapiens] |
| 934 | gi\|14591905 | NM_012423.2 | 60S ribosomal protein L13a |
| | | | [Homo sapiens] |
| 935 | gi\|38570153 | NM_012279.2 | zinc finger protein 346 [Homo |
| | | | sapiens] |
| 936 | gi\|44680150 | NM_014335.2 | EP300-interacting inhibitor |
| | | | of differentiation 1 [Homo |
| | | | sapiens] |
| 937 | gi\|166197689 | NM_001114090.1 | ephexin-1 isoform 2 [Homo |
| | | | sapiens] |
| 938 | gi\|75677342 | NM_015544.2 | transmembrane protein 98 |
| | | | [Homo sapiens] |
| 939 | gi\|27414496 | NM_014153.2 | zinc finger CCCH domain- |
| | | | containing protein 7A [Homo |
| | | | sapiens] |
| 940 | gi\|8922866 | NM_018322.1 | hypothetical protein LOC55776 |
| | | | [Homo sapiens] |
| 941 | gi\|142383690 | NM_022756.4 | chromatin modification- |
| | | | related protein MEAF6 [Homo |
| | | | sapiens] |
| 942 | gi\|186928845 | NM_032476.3 | 28S ribosomal protein S6, |
| | | | mitochondrial [Homo sapiens] |
| 943 | gi\|41872402 | NM_201398.1 | FAD synthase isoform 2 [Homo |
| | | | sapiens] |
| 944 | gi\|197304706 | NM_032350.5 | hypothetical protein LOC84310 |
| | | | [Homo sapiens] |
| 945 | gi\|56786146 | NM_001801.2 | cysteine dioxygenase type 1 |
| | | | [Homo sapiens] |
| 946 | gi\|55750040 | NM_001940.3 | atrophin-1 [Homo sapiens] |
| 947 | gi\|194097322 | NM_004092.3 | enoyl-CoA hydratase, |
| | | | mitochondrial precursor [Homo |
| | | | sapiens] |
| 948 | gi\|160420313 | NM_001456.3 | filamin-A isoform 1 [Homo |
| | | | sapiens] |
| 949 | gi\|89276752 | NM_198252.2 | gelsolin isoform b [Homo |
| | | | sapiens] |
| 950 | gi\|49472820 | NM_001539.2 | dnaJ homolog subfamily A |
| | | | member 1 [Homo sapiens] |
| 951 | gi\|62388891 | NM_002266.2 | importin subunit alpha-2 |
| | | | [Homo sapiens] |
| 952 | gi\|194440683 | NM_002337.2 | alpha-2-macroglobulin |
| | | | receptor-associated protein |
| | | | precursor [Homo sapiens] |
| 953 | gi\|93141028 | NM_001040134.1 | paralemmin isoform 2 [Homo |
| | | | sapiens] |
| 954 | gi\|103485495 | NM_002768.2 | charged multivesicular body |
| | | | protein 1a isoform 2 [Homo |
| | | | sapiens] |
| 955 | gi\|313760623 | NM_000442.4 | platelet endothelial cell |
| | | | adhesion molecule precursor |
| | | | [Homo sapiens] |
| 956 | gi\|47132588 | NM_002741.3 | serine/threonine-protein |
| | | | kinase N1 isoform 2 [Homo |
| | | | sapiens] |
| 957 | gi\|25777601 | NM_002808.3 | 26S proteasome non-ATPase |
| | | | regulatory subunit 2 [Homo |
| | | | sapiens] |
| 958 | gi\|30581139 | NM_006263.2 | proteasome activator complex |
| | | | subunit 1 isoform 1 [Homo |
| | | | sapiens] |
| 959 | gi\|104487294 | NM_130853.2 | receptor-type tyrosine- |
| | | | protein phosphatase S isoform |
| | | | 3 precursor [Homo sapiens] |
| 960 | gi\|71772428 | NM_001021.3 | 40S ribosomal protein S17 |
| | | | [Homo sapiens] |
| 961 | gi\|156416002 | NM_004168.2 | succinate dehydrogenase |
| | | | [ubiquinone] flavoprotein |
| | | | subunit, mitochondrial |
| | | | precursor [Homo sapiens] |
| 962 | gi\|118582263 | NM_006924.4 | serine/arginine-rich splicing |
| | | | factor 1 isoform 1 [Homo |
| | | | sapiens] |
| 963 | gi\|38181628 | BC061586.1 | TMSB4X protein [Homo sapiens] |
| 964 | gi\|37594440 | NM_003437.2 | zinc finger protein 136 [Homo |
| | | | sapiens] |
| 965 | gi\|83281439 | NM_003757.2 | eukaryotic translation |
| | | | initiation factor 3 subunit I |
| | | | [Homo sapiens] |
| 966 | gi\|23397695 | NM_152925.1 | copine-1 isoform a [Homo |
| | | | sapiens] |
| 967 | gi\|153791496 | NM_014675.3 | rootletin [Homo sapiens] |
| 968 | gi\|299829176 | NM_006989.5 | ras GTPase-activating protein |
| | | | 4 isoform 1 [Homo sapiens] |
| 969 | gi\|221307564 | NM_005805.4 | 26S proteasome non-ATPase |
| | | | regulatory subunit 14 [Homo |
| | | | sapiens] |
| 970 | gi\|138175804 | NM_006334.3 | noelin isoform 2 [Homo |
| | | | sapiens] |
| 971 | gi\|142379276 | NM_006541.3 | glutaredoxin-3 [Homo sapiens] |
| 972 | gi\|40805821 | NM_007263.3 | coatomer subunit epsilon |
| | | | isoform a [Homo sapiens] |
| 973 | gi\|254911095 | NM_001042486.2 | disks large-associated |
| | | | protein 4 isoform c [Homo |
| | | | sapiens] |
| 974 | gi\|194328807 | NM_012267.4 | hsp70-binding protein 1 [Homo |
| | | | sapiens] |
| 975 | gi\|42716281 | NM_013242.2 | transcription factor IIB |
| | | | [Homo sapiens] |
| 976 | gi\|54792141 | NM_019845.2 | protein reprimo [Homo |
| | | | sapiens] |
| 977 | gi\|209915598 | NM_032853.3 | PWWP domain-containing |
| | | | protein MUM1 [Homo sapiens] |
| 978 | gi\|50086623 | NM_033547.3 | integrator complex subunit 4 |
| | | | [Homo sapiens] |

The application's sequence listing, which the Patent Office published only in electronic form, follows.

SEQUENCE LISTING (1467 sequences)

SEQ ID NO: 1 - DNA, 1183 bp, Homo Sapiens
  misc_feature (1)..(1): n is a, c, g, or t
  misc_feature (907)..(907): n is a, c, g, or t
  misc_feature (940)..(940): n is a, c, g, or t
  misc_feature (945)..(945): n is a, c, g, or t
  misc_feature (949)..(949): n is a, c, g, or t
  misc_feature (959)..(959): n is a, c, g, or t
  misc_feature (961)..(961): n is a, c, g, or t
  misc_feature (963)..(963): n is a, c, g, or t
  misc_feature (972)..(972): n is a, c, g, or t
  misc_feature (1012)..(1012): n is a, c, g, or t
  misc_feature (1019)..(1019): n is a, c, g, or t
  misc_feature (1042)..(1042): n is a, c, g, or t
  misc_feature (1049)..(1049): n is a, c, g, or t
  misc_feature (1051)..(1051): n is a, c, g, or t
  misc_feature (1060)..(1060): n is a, c, g, or t
  misc_feature (1064)..(1064): n is a, c, g, or t
  misc_feature (1071)..(1071): n is a, c, g, or t
  misc_feature (1075)..(1075): n is a, c, g, or t
  misc_feature (1082)..(1082): n is a, c, g, or t
  misc_feature (1088)..(1088): n is a, c, g, or t
  misc_feature (1091)..(1091): n is a, c, g, or t
  misc_feature (1105)..(1105): n is a, c, g, or t
  misc_feature (1109)..(1109): n is a, c, g, or t
  misc_feature (1117)..(1118): n is a, c, g, or t
  misc_feature (1124)..(1124): n is a, c, g, or t
  misc_feature (1126)..(1126): n is a, c, g, or t
  misc_feature (1131)..(1131): n is a, c, g, or t
  misc_feature (1133)..(1133): n is a, c, g, or t
  misc_feature (1138)..(1138): n is a, c, g, or t
  misc_feature (1146)..(1146): n is a, c, g, or t
  misc_feature (1148)..(1149): n is a, c, g, or t
  misc_feature (1151)..(1151): n is a, c, g, or t
  misc_feature (1159)..(1159): n is a, c, g, or t
  misc_feature (1169)..(1169): n is a, c, g, or t
  misc_feature (1180)..(1180): n is a, c, g, or t
naatagaggaaattactatgagaggatcgcatcaccatcaccatcacggatcctatttaggtgacactatagaatcgtcgacccacgcgtccggtgacaaagcctttagtgggaattcaaaccttattaaacaccaactgatacatactggagagaagccctataaatgtattgagtgcgggaaagcctttaatccgaaagcaaatcccatgcaatatcagagaattcatacaggagagaaactttttgaatgtcaagagtgtggaaaaagcttcagtcagccatcacacgtgattcataatcaaaggaagcatgcttgagagaagccctacaaatgcagtgagtgtggaaggggcttcaaacatcacacctgattgatcatcaaagaatacacactggagagaaaacttatgtgtgtgtcatgtgggagaggctttattcagatgtcacacttgattcattgccacagaacacattctgtagagaagccacatgcatgtagtgtatgtgggaaatgcttcagccagagctcaacccttattagacattaggttgttcacattatggatagcaagtataagttaaaggaatgtgggcaggctttcagtgtgagctagcttctcagtcactatctcacaaattctactggagaggaacccctcaattcatacaggagagaagagcatccaagaatgcaacaaaggtgggaagactttcattgtagctcattatataatgtcagagagttcctgttggagagaacccctatggatgtaatgaatgttgaaaaagcatttatttggaactcacatattatttacaatgagataattcatagaggatataatggatatgagaggctttggtgtactgtgggaagtaggtggaaatgtgggttcctgctatngccagctgctcccttttgaataaactgccctancaggngctngccccagggngncntgcctctgnaggggaatcttgcttttaaactgggattgtaaaatggganacaaaanacagcccttattcctggctgggnaatgccncntggaaatgnctanggggagnccantggtccntggcgnggncctgatctccaaantgcngaaacccnnaacccnanacccnanccccnaaaaaagncnnanaaatgccnccccccaagngggatgccccngga

SEQ ID NO: 2 - DNA, 1188 bp, Homo Sapiens
  misc_feature (762)..(762): n is a, c, g, or t
  misc_feature (849)..(849): n is a, c, g, or t
  misc_feature (879)..(879): n is a, c, g, or t
  misc_feature (885)..(885): n is a, c, g, or t
  misc_feature (910)..(910): n is a, c, g, or t
  misc_feature (912)..(912): n is a, c, g, or t
  misc_feature (923)..(923): n is a, c, g, or t
  misc_feature (988)..(989): n is a, c, g, or t
  misc_feature (991)..(991): n is a, c, g, or t
  misc_feature (996)..(996): n is a, c, g, or t
  misc_feature (1010)..(1010): n is a, c, g, or t
  misc_feature (1025)..(1025): n is a, c, g, or t
  misc_feature (1027)..(1027): n is a, c, g, or t
  misc_feature (1030)..(1030): n is a, c, g, or t
  misc_feature (1037)..(1037): n is a, c, g, or t
  misc_feature (1041)..(1041): n is a, c, g, or t
  misc_feature (1050)..(1050): n is a, c, g, or t
  misc_feature (1056)..(1056): n is a, c, g, or t
  misc_feature (1058)..(1058): n is a, c, g, or t
  misc_feature (1066)..(1066): n is a, c, g, or t
  misc_feature (1088)..(1088): n is a, c, g, or t
  misc_feature (1094)..(1094): n is a, c, g, or t
  misc_feature (1110)..(1110): n is a, c, g, or t
  misc_feature (1114)..(1114): n is a, c, g, or t
  misc_feature (1126)..(1126): n is a, c, g, or t
  misc_feature (1136)..(1136): n is a, c, g, or t
  misc_feature (1139)..(1139): n is a, c, g, or t
  misc_feature (1151)..(1151): n is a, c, g, or t
  misc_feature (1153)..(1153): n is a, c, g, or t
  misc_feature (1155)..(1155): n is a, c, g, or t
  misc_feature (1160)..(1160): n is a, c, g, or t
  misc_feature (1164)..(1164): n is a, c, g, or t
  misc_feature (1168)..(1168): n is a, c, g, or t
  misc_feature (1170)..(1170): n is a, c, g, or t
  misc_feature (1176)..(1176): n is a, c, g, or t
  misc_feature (1184)..(1184): n is a, c, g, or t
  misc_feature (1186)..(1186): n is a, c, g, or t
tagagaaattaactatgagaggatcgcatcaccatcaccatcacggatcctatttaggtgacactatagaatcgtcgacccacgcgtccgagcgaggcccagctccctgaaacaacagtaacctacccctgtgggtcatcatcatgccctccgacctggccaagaagaaggcagccaaaaagaaggaggctgccaaagctcgacagcggcccagaaaaggacatgaagaaaatggagatgttgtcacagaaccacaggtggcagagaagaatgaggccaatggcagagagaccacagaagtagatttgctgaccaaggagctagaggactttgagatgaagaaagctgctgctcgagctgtcactggcgtcctggcctctcaccccaacagtactgatgttcacatcatcaacctctcactcacctttcatggtcaagagctgctcagtgacaccaaactggaattaaactcaggccgtcgttatggcctcattggttaaatggaattggaaagtccatgctgctctctgctattgggaagcgtgaagtgcccatccctgagcacatcgacatctaccatctgactcgagagatgccccctagtgacaagacacccttgcattgtgtgatggaagtcgacacagagcgggccatgctggagaaagaggcagagcggctggctcatgaggatgcggagtgtgagaagctcatggagctctacgagcgcctggaggagctggatgccgacaaggcagagatganggcctcgcggatcttgcatggactgggtttcacacctgccatgcagcgcaagaagctaaaagacttcagtgggggctggaggatganggttgcccttgccagagccctctttattcngccctncatgctgctcctggatgagcctacnanccccctggacntaaatgcttgcgtgtggttggaaaaaaactaaaaacttttaagcgcatcttggtcctcgtctccnntnccagnattttctgaatggngtctgtaccatatcntnccntgcccancaanaaactgaantttttncngggtattntgatccgtatgtgaaaacccgnctaaanctggagaaaaccaatnaaangtttcctgggancaaatcaatngcncctgaaaaatcntncnagttngtcntggnangccaantggccggngncc

SEQ ID NO: 3 - DNA, 870 bp, Homo Sapiens
catcaccatcaccatcacggatcctatttaggtgacactatagaatcgtcgacccacgcgtccgtgatgccaactttactgtccaggacaaccgagatggctccgccagcctgctgctgccctcccgccctgctccaccccgccatgccccctacttggttcccatagaactgtgggacggggggcagccggcgctgagcagcactgccacagtgactgttagtgtgtgccgctgccagcctgacggctctgtggcatcctgctggcctgaggctcacctctcagctgctgggctcagcaccggcgccctgcttgccatcatcacctgtgtgggtgccctgcttgccctggtggtgctcttcgtggccctgcggcggcagaagcaagaagcactgatggtactggaggaggaggacgtccgagagaacatcatcacctacgacgacgagggcggcggcgaggaggacaccgaggccttcgacatcacggccttgcagaacccggacggggcggcccccccggcgcccggccctcccgcgcgccgagacgtgttgccccgggcccgggtgtcgcgccagcccagaccccccggccccgccgacgtggcgcagctcctggcgctgcggctccgcgaggcggacgaggaccccggcgtacccccgtacgactcggtgcaggtgtacggctacgagggccgcggctcctcttgcggctccctcagctccctgggctccggcagcgaagccggcggcgcccccggtcccgcggagccgctggacgactggggtccgctcttccgcaccctgtccgagctgtatggggcccaaggagcccccggccccctgagcgcccgggctggcccggcccacc

SEQ ID NO: 4 - DNA, 876 bp, Homo Sapiens
  misc_feature (214)..(214): n is a, c, g, or t
  misc_feature (236)..(236): n is a, c, g, or t
  misc_feature (335)..(335): n is a, c, g, or t
  misc_feature (340)..(340): n is a, c, g, or t
  misc_feature (362)..(362): n is a, c, g, or t
  misc_feature (415)..(415): n is a, c, g, or t
  misc_feature (418)..(418): n is a, c, g, or t
  misc_feature (493)..(493): n is a, c, g, or t
  misc_feature (673)..(673): n is a, c, g, or t
  misc_feature (771)..(771): n is a, c, g, or t
  misc_feature (773)..(773): n is a, c, g, or t
  misc_feature (780)..(780): n is a, c, g, or t
  misc_feature (790)..(790): n is a, c, g, or t
  misc_feature (792)..(792): n is a, c, g, or t
  misc_feature (799)..(799): n is a, c, g, or t
  misc_feature (801)..(801): n is a, c, g, or t
  misc_feature (811)..(811): n is a, c, g, or t
  misc_feature (818)..(823): n is a, c, g, or t
  misc_feature (830)..(830): n is a, c, g, or t
  misc_feature (833)..(833): n is a, c, g, or t
  misc_feature (837)..(839): n is a, c, g, or t
  misc_feature (841)..(841): n is a, c, g, or t
  misc_feature (846)..(846): n is a, c, g, or t
  misc_feature (850)..(850): n is a, c, g, or t
  misc_feature (860)..(860): n is a, c, g, or t
  misc_feature (868)..(868): n is a, c, g, or t
  misc_feature (876)..(876): n is a, c, g, or t
tagagaaattactatgagaggatcgcatcaccatcaccatcacggatcctatttaggtgacactatagaatcgtcgacccacgcgtccgcggacgcgtgggtcaagggcagcaagaaggccatcaaggtgttctccagtgccaagtaccctgctccagggcgcctgcaggaatatggctccatcttcacgggcgcccaggaccctggcctgcanagacgcccccgccacaggatcnagagcaagcaccgccccctggacgagcgggccctgcaggagaagctgaaggactttcctgtgtgcgtgagcaccaagccggagcccgaggacgatgcanaaganggacttgggggtcttcccagcnacatcagctctgtcagctccttgctgctcttcaacaccaccgagaacctgtanaanaagtatgtcttcctggaccccctggctggtgctgtaacaaagacccatgtgatgctgggggcagagacagagganaagctgtttgatgcccccttgtccatcagcaagagagagcagctggaacagcaggtcccagagaactacttctatgtgccagacctgggccaggtgcctgagattgatgttccatcctacctgcctgacctgcccggcattgccaacgacctcatgtacattgccgacctgggccccggnattgccccctctgcccctggcaccattccagaactgcccaccttccacactgaggtagccgagcctctcaaggcagacctacaagatggggtactaanancaccccnaccgcccccntnaccactncnagctcctgangtgctgnnnnnngaacccncantccnnncntcaancgtngcccctgtangccaaggngccaaggn

SEQ ID NO: 5 - DNA, 1090 bp, Homo Sapiens
  misc_feature (2)..(5): n is a, c, g, or t
  misc_feature (7)..(7): n is a, c, g, or t
  misc_feature (769)..(769): n is a, c, g, or t
  misc_feature (790)..(790): n is a, c, g, or t
  misc_feature (793)..(793): n is a, c, g, or t
  misc_feature (819)..(819): n is a, c, g, or t
  misc_feature (827)..(827): n is a, c, g, or t
  misc_feature (846)..(846): n is a, c, g, or t
  misc_feature (851)..(851): n is a, c, g, or t
  misc_feature (867)..(867): n is a, c, g, or t
  misc_feature (879)..(879): n is a, c, g, or t
  misc_feature (903)..(903): n is a, c, g, or t
  misc_feature (922)..(922): n is a, c, g, or t
  misc_feature (925)..(925): n is a, c, g, or t
  misc_feature (930)..(930): n is a, c, g, or t
  misc_feature (933)..(933): n is a, c, g, or t
  misc_feature (938)..(938): n is a, c, g, or t
  misc_feature (945)..(945): n is a, c, g, or t
  misc_feature (957)..(957): n is a, c, g, or t
  misc_feature (968)..(968): n is a, c, g, or t
  misc_feature (984)..(984): n is a, c, g, or t
  misc_feature (997)..(997): n is a, c, g, or t
  misc_feature (1000)..(1000): n is a, c, g, or t
  misc_feature (1002)..(1003): n is a, c, g, or t
  misc_feature (1006)..(1006): n is a, c, g, or t
  misc_feature (1018)..(1018): n is a, c, g, or t
  misc_feature (1021)..(1021): n is a, c, g, or t
  misc_feature (1041)..(1041): n is a, c, g, or t
  misc_feature (1044)..(1045): n is a, c, g, or t
  misc_feature (1048)..(1049): n is a, c, g, or t
  misc_feature (1057)..(1057): n is a, c, g, or t
  misc_feature (1071)..(1071): n is a, c, g, or t
  misc_feature (1076)..(1076): n is a, c, g, or t
cnnnnanaatagagaaattactatgagaggatcgcatcaccatcaccatcacggatcctatttaggtgacactatagaatcgtcgacccacgcgtccgcagcgctgcacccccttcatgtagctttcgatgcttgtttctttccgtctttgttgtcactatctttgtctatcagtacgaaagtacaaagtagctgccggcaatgaaataggggtgctgtttgcacctgcaggttaggggtggaggcgtttagaattttggggtgtgattgagccccgtttataattagaatgcccctggacccctaccactctgtgacgtgggggcacgcgcagggatcccatcattttgtgtttggggagctcagagtgcgcccaatcttggaatctttaagggatgagccagacccagacccgcggccttctagagagggtccggcagggagggtcggcgccctggcccggggtgggccggagccctgtgatgctgcatcgcccccaggaggagccagctgtgccccagagttggcgcggccgagagaggacaagagcgcgcagcaggcgaagctggagggcgggactcgactttgttgtcgctgcccggaggagtcgagactggtacccggaggagctgtctcaccaggagacccacgtcctggaagtgtccgggactcgcgggacctgtggctgcagaccccgccggcacgcaggcccagagctggcgcactcctgaagatgagactctgggggccctaaccggggtccacgggnagggctgtcccttggggactntangatggcttcgttctggcccggctcanttctggancctgtgaaaacccaaaganaaaangggctgaaaggatttntcatttgaaaanaatttcgtgccggaaaaaaccccntgaatccctaaggaatttntcntcttnaanactcnaaaaggntttaataacccnggaaacccccntgggcaaaaaaatttnacccccccggccnatncnntgntttaactccggnaangtaaaagggttaaaaacccnaannctnnaaaacccnggaaaataaatttnctttncaaaggtccggaaa

SEQ ID NO: 6 - DNA, 1042 bp, Homo Sapiens
  misc_feature (2)..(2): n is a, c, g, or t
  misc_feature (801)..(801): n is a, c, g, or t
  misc_feature (845)..(845): n is a, c, g, or t
  misc_feature (858)..(858): n is a, c, g, or t
  misc_feature (878)..(878): n is a, c, g, or t
  misc_feature (881)..(881): n is a, c, g, or t
  misc_feature (895)..(895): n is a, c, g, or t
  misc_feature (909)..(909): n is a, c, g, or t
  misc_feature (925)..(925): n is a, c, g, or t
  misc_feature (950)..(950): n is a, c, g, or t
  misc_feature (955)..(955): n is a, c, g, or t
  misc_feature (957)..(957): n is a, c, g, or t
  misc_feature (981)..(981): n is a, c, g, or t
  misc_feature (996)..(996): n is a, c, g, or t
  misc_feature (1005)..(1005): n is a, c, g, or t
  misc_feature (1012)..(1012): n is a, c, g, or t
  misc_feature (1017)..(1017): n is a, c, g, or t
  misc_feature (1019)..(1019): n is a, c, g, or t
  misc_feature (1022)..(1023): n is a, c, g, or t
  misc_feature (1025)..(1025): n is a, c, g, or t
  misc_feature (1028)..(1028): n is a, c, g, or t
  misc_feature (1035)..(1037): n is a, c, g, or t
  misc_feature (1041)..(1041): n is a, c, g, or t
anttagagaaattactatgagaggatcgcatcaccatcaccatcacggatcctatttaggtgacactatagaatcgtcgacccacgcgtccgggaggaagaggaggaggaggaagggagcaccagtgaagaatcagaggaggaggaggaggaagaggaagaggaggaggaggagaccggcagcaactctgaggaggcatcagagcagtctgccgaagaagtaagtgaggaagaaatgagtgaagatgaagaacgagaaaatgaaaaccacctcttggttgttccagagtcacggttcgaccgagattccggggagagtgaagaagcagaggaagaagtgggtgagggaacgccgcagagcagcgccctgacagagggcgactatgtgcccgactcccctgccctgtcgcccatcgagctcaagcaggagctgcccaagtacctgccggccctgcagggctgccggagcgtcgaggagttccagtgcctgaacaggatcgaggagggcacctatggagtggtctacagagcaaaagacaagaaaacagatgaaattgtggctctaaagcggctgaagatggagaaggagaaggagggcttcccgatcacgtcgctgagggagatcaacaccatcctcaaggcccagcatcccaacatcgtcaccgttagagagattgtggtgggcagcaacatggacaagatctacatcgtgatgaactatgtggagcacgacctcaagagcctgatggagaccatgaaacagcccttcctgccaggggaggtgaagaccctgatgatccanctgctgcgtggggtgaaacacctgcacgacaactggatcctgcnccgtgacctcaanacgtccaacctgctgctganccncgccggcatcctcnaggtgggtgacttncgggctggcgcgggantacggatcccctctgaaggcctacnccccngntcgtggtgaccctgtggtaccccnccccaaaactgctgnttggtgccnagaatantcccngnccnngnacntttggtnnntggnt

SEQ ID NO: 7 - DNA, 1039 bp, Homo Sapiens
  misc_feature (1)..(1): n is a, c, g, or t
  misc_feature (710)..(710): n is a, c, g, or t
  misc_feature (771)..(771): n is a, c, g, or t
  misc_feature (776)..(776): n is a, c, g, or t
  misc_feature (846)..(846): n is a, c, g, or t
  misc_feature (854)..(854): n is a, c, g, or t
  misc_feature (897)..(897): n is a, c, g, or t
  misc_feature (907)..(907): n is a, c, g, or t
  misc_feature (909)..(909): n is a, c, g, or t
  misc_feature (924)..(924): n is a, c, g, or t
  misc_feature (939)..(939): n is a, c, g, or t
  misc_feature (943)..(943): n is a, c, g, or t
  misc_feature (946)..(946): n is a, c, g, or t
  misc_feature (965)..(965): n is a, c, g, or t
  misc_feature (968)..(968): n is a, c, g, or t
  misc_feature (972)..(972): n is a, c, g, or t
  misc_feature (977)..(977): n is a, c, g, or t
  misc_feature (980)..(980): n is a, c, g, or t
  misc_feature (983)..(983): n is a, c, g, or t
  misc_feature (987)..(987): n is a, c, g, or t
  misc_feature (991)..(991): n is a, c, g, or t
  misc_feature (1003)..(1003): n is a, c, g, or t
  misc_feature (1006)..(1006): n is a, c, g, or t
  misc_feature (1023)..(1023): n is a, c, g, or t
  misc_feature (1025)..(1025): n is a, c, g, or t
  misc_feature (1030)..(1031): n is a, c, g, or t
  misc_feature (1035)..(1035): n is a, c, g, or t
naatagagaaattactatgagaggatcgcatcaccatcaccatcacggatcctatttaggtgacactatagaatcgtcgacccacgcgtccgcccacgcgtccgcccacgcgtccgcacacttgcaggctaccagaccctgggggaggagtacgtcagcatcatccaggtggacccatcgcggatacatgtgccctcctcgctgcgccgtggcgtgctggtgacactgcatgccgtcctgccctacctgctggacaaggccctgctccccctggagcaggagctgcaggctgaccccgacagtgggcgacccttgcaggggagcctggggccaggtgggcgtggctgctcaggggcgcggcgctggatgcgtcaccacacggccaccctgactgagcagcagaggagggcgctgctgcgggcggtcttcgtcctcagacagggcctcgcctgcctccagcggctacatgttgcctggttttacatccacggtgtcttctaccacctggccaagaggctcacggggatcacgtacctccgtgtccgcagcctgcccggagaggacctgagggcccgtgttagctacaggctgctgggggtcatctcactgctgcacctggtgctgtccatggggctgcagctgtacggtttcaggcagcggcagcgagccaggaaggagtggaggctgcaccgcggcctgtctcaccgcanggcctccttggaggagagagccgtttccagaaaccccctgtgcaccctgtgcctggaggancgcangcacccaacagccacgccctgcggccacctgttctgctgggagtgcatcaccgcgtggtgcaccagcaanggcggaantgtcccctctgccgggaaaaatttccctccccaagaagctcanctacctttcngnacttaccgctgaaanccgggcgcccggggngggnccntggaaaaacaagatgaacnttntacngggangtnttnaacncccnaagaattttaantcntcaaggattaaaccttngntttgnnacanaaaa

SEQ ID NO: 8 - DNA, 1204 bp, Homo Sapiens
  misc_feature (15)..(15): n is a, c, g, or t
  misc_feature (862)..(862): n is a, c, g, or t
  misc_feature (906)..(906): n is a, c, g, or t
  misc_feature (909)..(909): n is a, c, g, or t
  misc_feature (955)..(955): n is a, c, g, or t
  misc_feature (970)..(970): n is a, c, g, or t
  misc_feature (974)..(974): n is a, c, g, or t
  misc_feature (982)..(982): n is a, c, g, or t
  misc_feature (989)..(989): n is a, c, g, or t
  misc_feature (993)..(993): n is a, c, g, or t
  misc_feature (1001)..(1002): n is a, c, g, or t
  misc_feature (1006)..(1006): n is a, c, g, or t
  misc_feature (1019)..(1019): n is a, c, g, or t
  misc_feature (1025)..(1025): n is a, c, g, or t
  misc_feature (1027)..(1027): n is a, c, g, or t
  misc_feature (1032)..(1032): n is a, c, g, or t
  misc_feature (1034)..(1034): n is a, c, g, or t
  misc_feature (1041)..(1041): n is a, c, g, or t
  misc_feature (1063)..(1063): n is a, c, g, or t
  misc_feature (1068)..(1068): n is a, c, g, or t
  misc_feature (1077)..(1077): n is a, c, g, or t
  misc_feature (1080)..(1080): n is a, c, g, or t
  misc_feature (1082)..(1082): n is a, c, g, or t
  misc_feature (1089)..(1089): n is a, c, g, or t
  misc_feature (1092)..(1092): n is a, c, g, or t
  misc_feature (1099)..(1099): n is a, c, g, or t
  misc_feature (1109)..(1109): n is a, c, g, or t
  misc_feature (1117)..(1117): n is a, c, g, or t
  misc_feature (1121)..(1121): n is a, c, g, or t
  misc_feature (1128)..(1128): n is a, c, g, or t
  misc_feature (1152)..(1152): n is a, c, g, or t
  misc_feature (1155)..(1155): n is a, c, g, or t
  misc_feature (1160)..(1160): n is a, c, g, or t
  misc_feature (1162)..(1162): n is a, c, g, or t
  misc_feature (1168)..(1168): n is a, c, g, or t
  misc_feature (1175)..(1176): n is a, c, g, or t
  misc_feature (1185)..(1185): n is a, c, g, or t
  misc_feature (1188)..(1188): n is a, c, g, or t
  misc_feature (1195)..(1195): n is a, c, g, or t
  misc_feature (1201)..(1201): n is a, c, g, or t
  misc_feature (1203)..(1203): n is a, c, g, or t
caatagagaaattanctatgagaggatcgcatcaccatcaccatcacggatcctatttaggtgacactatagaatcgtcgacccacgcgtccggtggcggccaagcgggatacgggcggcgggagctggggaacaggcatggacgtttccgggcaagagaccgactggcggagcaccgccttccggcagaagctggtcagtcaaatcgaggatgccatgaggaaagctggtgtggcacacagtaaatccagcaaggatatggagagccatgttttcctgaaggccaagacccgggacgaatacctttctctcgtggccaggctcattatccattttcgagacattcataacaagaaatctcaagcttccgtcagtgatcctatgaatgcactccagagcctgactggcggacctgctgcgggagccgctggaattggcatgcctcctcggggcccgggacagtctctgggcgggatgggtagccttggtgccatgggacagccaatgtctctctcagggcagccgcctcctgggacctcggggatggcccctcacagcatggctgtcgtgtctacggcaactccacagacccagctgcagctccagcaggtggcgctgcagcagcagcagcaacagcagcagttccagcagcagcagcaggcggcgctacagcagcagcagcagcagcagcaacagcagcagttccaggctcagcagagtgccatgcagcagcagttccaagcagtagtgcagcagcagcagcagctccagcagcagcagcagcagcagcagcatctaattaaattgcatcatcaaaatcagcaacagatacagcagcagcaacagcagctgcagcgaatancacagctgcagctccaacaacagcaacagcagcagcagcagcancancagcagcagcagcaggctttgcaggccccagccaccaattcagcanccaccgatgcagcanccanagcctccnccctccnaggntctgcccnnccanctgcaagcaaatncatcananaaagnancaaccangcggccaacaacggcccccggngccancgaacaaanagnantactttnccnacccccntcttggaatnccttcctnggcnaaatccncctcaccttttttaaaccattccntgnacccnantttttncaaccannaaaccccanttncgggccncccatnang

SEQ ID NO: 9 - DNA, 1081 bp, Homo Sapiens
  misc_feature (101)..(101): n is a, c, g, or t
  misc_feature (363)..(363): n is a, c, g, or t
  misc_feature (545)..(545): n is a, c, g, or t
  misc_feature (563)..(563): n is a, c, g, or t
  misc_feature (656)..(656): n is a, c, g, or t
  misc_feature (745)..(745): n is a, c, g, or t
  misc_feature (757)..(757): n is a, c, g, or t
  misc_feature (790)..(790): n is a, c, g, or t
  misc_feature (796)..(796): n is a, c, g, or t
  misc_feature (811)..(811): n is a, c, g, or t
  misc_feature (819)..(819): n is a, c, g, or t
  misc_feature (824)..(824): n is a, c, g, or t
  misc_feature (830)..(830): n is a, c, g, or t
  misc_feature (836)..(836): n is a, c, g, or t
  misc_feature (855)..(855): n is a, c, g, or t
  misc_feature (871)..(871): n is a, c, g, or t
  misc_feature (878)..(878): n is a, c, g, or t
  misc_feature (891)..(891): n is a, c, g, or t
  misc_feature (895)..(895): n is a, c, g, or t
  misc_feature (905)..(905): n is a, c, g, or t
  misc_feature (913)..(913): n is a, c, g, or t
  misc_feature (922)..(922): n is a, c, g, or t
  misc_feature (932)..(932): n is a, c, g, or t
  misc_feature (934)..(934): n is a, c, g, or t
  misc_feature (942)..(942): n is a, c, g, or t
  misc_feature (956)..(956): n is a, c, g, or t
  misc_feature (959)..(959): n is a, c, g, or t
  misc_feature (964)..(964): n is a, c, g, or t
  misc_feature (967)..(968): n is a, c, g, or t
  misc_feature (971)..(971): n is a, c, g, or t
  misc_feature (976)..(976): n is a, c, g, or t
  misc_feature (985)..(985): n is a, c, g, or t
  misc_feature (990)..(990): n is a, c, g, or t
  misc_feature (992)..(992): n is a, c, g, or t
  misc_feature (1003)..(1003): n is a, c, g, or t
  misc_feature (1006)..(1006): n is a, c, g, or t
  misc_feature (1010)..(1010): n is a, c, g, or t
  misc_feature (1017)..(1017): n is a, c, g, or t
  misc_feature (1027)..(1028): n is a, c, g, or t
  misc_feature (1034)..(1035): n is a, c, g, or t
  misc_feature (1052)..(1052): n is a, c, g, or t
  misc_feature (1054)..(1054): n is a, c, g, or t
  misc_feature (1060)..(1060): n is a, c, g, or t
  misc_feature (1072)..(1072): n is a, c, g, or t
  misc_feature (1076)..(1076): n is a, c, g, or t
  misc_feature (1079)..(1079): n is a, c, g, or t
  misc_feature (1081)..(1081): n is a, c, g, or t
gattagagagattactatgagaggatcgcatcaccctcaccatcacggatcctatttaggtgacactatagaatcgtcgacccacgcgtccgggcagcccntcggcctcccgggagtccctggtgaaggggcgagctgggccagacaccagtgccagcggggagccaggtgccaacagcaagctcctgtacaaggcctcggtggtgaagaaggcggctgcacgcaggaggcggcaccccgacgaggccttcgaccatgaggtctccgccttcttccccgccaacctggacttcctgtgcctgcaggaggtgtttgacaagcgagcagccaccaaattgaaagagcagctgcacggctacttcnagtacatcctgtacgacgtcggggtctacggctgccagggctgctgcagcttcaagtgtctcaacagcggcctcctctttgccagccgctaccccatcatggacgtggcctatcactgttaccccaacaagtgtaacgacgatgccctggcctctaagggagctctgtttctcaaggtgcangtgggaagcacacctcangaccaaagaatcgtcgggtacatcgcctgcacacacctgcatgccccgcaagaggacagcgccatccggtgtgggcagctggacctgcttcangactggctggctgatttccgaaaatctacctcctcgtccagcgcaaccaaccccgaggagctggtggcatttgacgtcgtctgtggaanatttcaactttnataactgctcctctgacgacaagctggagcaancaacantccctgttcacccantaaaaagnacccnttgccnccttgnggcctggtagaaggaaaancccgatgggcccatcngtactcntgctggaaaaaanaacnggccttgtancaatgaanaatgttgtncaccccccananaaccttgnaaaaagttccttgnaanaattnaannaangctcncaatgaaantaacntnggcgttttccnacnacanaaaaacnttccgaccannataggnnctagaaatgaatttgtntnaaaggnaaaccgccgggnccantcnan

SEQ ID NO: 10 - DNA, 1154 bp, Homo Sapiens
  misc_feature (862)..(862): n is a, c, g, or t
  misc_feature (888)..(888): n is a, c, g, or t
  misc_feature (910)..(910): n is a, c, g, or t
  misc_feature (931)..(931): n is a, c, g, or t
  misc_feature (937)..(937): n is a, c, g, or t
  misc_feature (945)..(945): n is a, c, g, or t
  misc_feature (963)..(963): n is a, c, g, or t
  misc_feature (965)..(965): n is a, c, g, or t
  misc_feature (980)..(980): n is a, c, g, or t
  misc_feature (990)..(991): n is a, c, g, or t
  misc_feature (1014)..(1014): n is a, c, g, or t
  misc_feature (1025)..(1025): n is a, c, g, or t
  misc_feature (1029)..(1029): n is a, c, g, or t
  misc_feature (1042)..(1042): n is a, c, g, or t
  misc_feature (1049)..(1049): n is a, c, g, or t
  misc_feature (1051)..(1051): n is a, c, g, or t
  misc_feature (1056)..(1057): n is a, c, g, or t
  misc_feature (1064)..(1064): n is a, c, g, or t
  misc_feature (1073)..(1073): n is a, c, g, or t
  misc_feature (1075)..(1075): n is a, c, g, or t
  misc_feature (1083)..(1083): n is a, c, g, or t
  misc_feature (1107)..(1107): n is a, c, g, or t
  misc_feature (1110)..(1110): n is a, c, g, or t
  misc_feature (1122)..(1122): n is a, c, g, or t
  misc_feature (1131)..(1131): n is a, c, g, or t
  misc_feature (1133)..(1133): n is a, c, g, or t
  misc_feature (1136)..(1136): n is a, c, g, or t
  misc_feature (1139)..(1139): n is a, c, g, or t
  misc_feature (1142)..(1143): n is a, c, g, or t
  misc_feature (1145)..(1145): n is a, c, g, or t
  misc_feature (1147)..(1147): n is a, c, g, or t
agagaaattactatgagaggatcgcatcaccatcaccatcacggatcctatttaggtgacactatagaatcgtcgacccacgcgtccggtcggcacaaggtgctgccccagctgctgaccgccttcgagttcggcaatgctggggccgttgtcctcacgcccctcttcaaggtgggcaagttcctgagcgctgaggagtatcagcagaagatcatccctgtggtggtcaagatgttctcatccactgaccgggccatgcgcatccgcctcctgcagcagatggagcagttcatccagtaccttgacgagccaacagtcaacacccagatcttcccccacgtcgtacatggcttcctggacaccaaccctgccatccgggagcagacggtcaagtccatgctgctcctggccccaaagctgaacgaggccaacctcaatgtggagctgatgaagcactttgcacggctacaggccaaggatgaacagggccccatccgctgcaacaccacagtctgcctgggcaaaatcggctcctacctcagtgctagcaccagacacagggtccttacctctgccttcagccgagccactagggacccgtttgcaccgtcccgggttgcgggtgtcctgggctttgctgccacccacaacctctactcaatgaacgactgtgcccagaagatcctgcctgtgctctgcggtctcactgtagatcctgagaaatccgtgcgagaccaggccttcaaggccattcggagcttcctgtccaaattggagtctgtgtcggaggacccgacccagctggaggaagtggagaaggatgtccatgcagcctccagccctggcatgggaggagccgcanctagctgggcaggctgggccgtgacngggtctcctcactcacctccangctgatccgttcgcacccaancactgncccaacanaaaccaaattccccaaanantcacgcctgaagganttctgcccannccccaccctgttctgcaccctanaactcaggccntggnaacccggagaganaggaccncnaaganncccctgngaaatggananaaaatggnacctgaaaagaggcaattttttgncanagaaatgaaacngggcaagancngtnttngtnnantnaaaaatc

SEQ ID NO: 11 - DNA, 1266 bp, Homo Sapiens
  misc_feature (11)..(11): n is a, c, g, or t
  misc_feature (814)..(814): n is a, c, g, or t
  misc_feature (913)..(913): n is a, c, g, or t
  misc_feature (978)..(978): n is a, c, g, or t
  misc_feature (1022)..(1022): n is a, c, g, or t
  misc_feature (1025)..(1025): n is a, c, g, or t
  misc_feature (1029)..(1029): n is a, c, g, or t
  misc_feature (1031)..(1031): n is a, c, g, or t
  misc_feature (1041)..(1041): n is a, c, g, or t
  misc_feature (1046)..(1046): n is a, c, g, or t
  misc_feature (1052)..(1052): n is a, c, g, or t
  misc_feature (1054)..(1054): n is a, c, g, or t
  misc_feature (1073)..(1073): n is a, c, g, or t
  misc_feature (1078)..(1078): n is a, c, g, or t
  misc_feature (1083)..(1083): n is a, c, g, or t
  misc_feature (1089)..(1089): n is a, c, g, or t
  misc_feature (1102)..(1102): n is a, c, g, or t
  misc_feature (1108)..(1108): n is a, c, g, or t
  misc_feature (1112)..(1112): n is a, c, g, or t
  misc_feature (1118)..(1118): n is a, c, g, or t
  misc_feature (1121)..(1121): n is a, c, g, or t
  misc_feature (1124)..(1124): n is a, c, g, or t
  misc_feature (1127)..(1127): n is a, c, g, or t
  misc_feature (1135)..(1135): n is a, c, g, or t
  misc_feature (1142)..(1142): n is a, c, g, or t
  misc_feature (1145)..(1145): n is a, c, g, or t
  misc_feature (1148)..(1148): n is a, c, g, or t
  misc_feature (1157)..(1157): n is a, c, g, or t
  misc_feature (1159)..(1160): n is a, c, g, or t
  misc_feature (1162)..(1162): n is a, c, g, or t
  misc_feature (1170)..(1170): n is a, c, g, or t
  misc_feature (1182)..(1182): n is a, c, g, or t
  misc_feature (1191)..(1191): n is a, c, g, or t
  misc_feature (1193)..(1193): n is a, c, g, or t
  misc_feature (1207)..(1207): n is a, c, g, or t
  misc_feature (1213)..(1213): n is a, c, g, or t
  misc_feature (1218)..(1218): n is a, c, g, or t
  misc_feature (1221)..(1221): n is a, c, g, or t
  misc_feature (1225)..(1226): n is a, c, g, or t
  misc_feature (1242)..(1242): n is a, c, g, or t
  misc_feature (1244)..(1244): n is a, c, g, or t
  misc_feature (1261)..(1261): n is a, c, g, or t
agagagattanctatgagaggatcgcatcaccatcaccatcacggatcctatttaggtgacactatagaatcgtcgacccacgcgtccgcccacgcgtccggacagattgtcttggagaacagtagccgggaagacaaacatgaatgcccctttggccgcagtgccattgagctcaccaaaatgctctgtgaaatcctgcaggttggggaactaccaaatgaaggacgcaatgactaccacccgatgttctttacccatgaccgagcctttgaagagctctttggaatctgcatccagctgttgaacaagacctggaaggagatgagggcaacagcagaggacttcaacaaggttatgcaagtcgtccgagagcaaatcactcgagctttgccctccaaacccaactctttggatcagttcaagagcaaattgcgtagcctgagttactctgagattctacgactgcgccagtctgagaggatgagtcaggatgacttccagtccccgccaattgtggagctgagggagaagatccagcccgagatccttgagctgatcaagcagcagcgcctgaaccggctctgtgagggcagcagcttccgaaagattgggaaccgccgaaggcaagaacggttctggtactgccggttggcactgaaccacaaggtccttcactatggtgacttggatgacaacccacaaggggaggtgacatttgaatccctgcaggagaaaattcctgttgcagacattaaggccattgtcactgggaaagattgtccccacatgaaagagaaaagtgctctgaaacanaacaaggaggtgttggaattggccttctccatcctgtatgaccctgatgagaccttaaacttcatcgcacctaataaatatgagtactgcatctggatngacggcctcagtgcccttctggggaaggacatgtccagtggagctgaccaaaagtgacctggacnccctgctgaacatggaaatgaagctgcggctcctggacctgganaanatcnanattcccgaanccccncccccntncccaaggagcccacagctntgaanttttntatccntatgggtgaaccnggaccnaaancgacgntanccnggnaaaaggantttgggnccnagnaaaaacctnanntncgggggcntgtcttttgctngaaaaaacngnaaggattttggggncaaaantgccnccntttnnaaacccctcggaaacncnaaattcccttggcccgnccaaa

SEQ ID NO: 12 - DNA, 1087 bp, Homo Sapiens
  misc_feature (782)..(782): n is a, c, g, or t
  misc_feature (791)..(791): n is a, c, g, or t
  misc_feature (794)..(794): n is a, c, g, or t
  misc_feature (861)..(861): n is a, c, g, or t
  misc_feature (872)..(872): n is a, c, g, or t
  misc_feature (882)..(882): n is a, c, g, or t
  misc_feature (891)..(891): n is a, c, g, or t
  misc_feature (893)..(893): n is a, c, g, or t
  misc_feature (900)..(900): n is a, c, g, or t
  misc_feature (905)..(905): n is a, c, g, or t
  misc_feature (908)..(908): n is a, c, g, or t
  misc_feature (921)..(922): n is a, c, g, or t
  misc_feature (926)..(926): n is a, c, g, or t
  misc_feature (928)..(928): n is a, c, g, or t
  misc_feature (936)..(936): n is a, c, g, or t
  misc_feature (948)..(948): n is a, c, g, or t
  misc_feature (960)..(961): n is a, c, g, or t
  misc_feature (969)..(970): n is a, c, g, or t
  misc_feature (981)..(981): n is a, c, g, or t
  misc_feature (1003)..(1003): n is a, c, g, or t
  misc_feature (1005)..(1005): n is a, c, g, or t
  misc_feature (1015)..(1016): n is a, c, g, or t
  misc_feature (1024)..(1024): n is a, c, g, or t
  misc_feature (1039)..(1039): n is a, c, g, or t
  misc_feature (1048)..(1048): n is a, c, g, or t
  misc_feature (1050)..(1050): n is a, c, g, or t
  misc_feature (1063)..(1063): n is a, c, g, or t
  misc_feature (1066)..(1066): n is a, c, g, or t
  misc_feature (1069)..(1069): n is a, c, g, or t
  misc_feature (1073)..(1073): n is a, c, g, or t
  misc_feature (1076)..(1076): n is a, c, g, or t
  misc_feature (1078)..(1078): n is a, c, g, or t
  misc_feature (1082)..(1083): n is a, c, g, or t
caatagagaaattactatgagaggatcgcatcaccatcaccatcacggatcctatttaggtgacactatagaatcgtcgacccacgcgtccgggcttgtactggagcaagaaacacatgggttatcgccaagctgaattccagattctgaaagctgagctggaaagaaccaaagaggaaaagcaagagttaaaagagaaactgaaggaaacagagacacacctggaaatgctgcagaaggctcaggtctcctaccggaccccagagggagatgacctagaaagggctttggcaaagcttacgcggctacgtatccacgtcagctatctccttacttctgtcctccctcacttggagcttcgtgagatcgggtatgactcagaacaagtggatgggatcctgtacacggtgctggaggcaaatcacatactggattgagcaccagactgtatacccttctcttctcttatcttctgtctgttctcttttctctccctccctcacgtctctctctctctctctctctctctctctctctctctctcaccctcacctttatgccttatatagagaatctctgtgtaaatcctggctcataatcagtctcctttttatcagttttggtgtggagaaagaggccagtttaaataggctttcaagagtctagggtcagaaaagcaatagtcactaagctaggtgacctgaaagctttaattttcatgacctggatatgtggtctattgtatatctttttctgaaatggtttgtattcatttaggttanatcaatcancanatattggggtcccggtataccaggtattaattttggggttaagctaacaagtacaacctcatgtttngcaacccttcnaaaatgtaanaaatctcgntnggaaacntaagnacntacctccacattnntccncnaaagtgtntgataatgtacnaactgagtggtnnaaaattgnntggaaaaatcngggggggagaaaatttcaaggnangccccacccnnaaatgggnccttaatttaaaggnttaaaaaangngccgggccccccnggncangganggntntttnngggg

SEQ ID NO: 13 - DNA, 1146 bp, Homo Sapiens
  misc_feature (1)..(1): n is a, c, g, or t
  misc_feature (3)..(3): n is a, c, g, or t
  misc_feature (921)..(921): n is a, c, g, or t
  misc_feature (923)..(923): n is a, c, g, or t
  misc_feature (968)..(968): n is a, c, g, or t
  misc_feature (989)..(989): n is a, c, g, or t
  misc_feature (995)..(995): n is a, c, g, or t
  misc_feature (997)..(997): n is a, c, g, or t
  misc_feature (1003)..(1004): n is a, c, g, or t
  misc_feature (1007)..(1007): n is a, c, g, or t
  misc_feature (1009)..(1009): n is a, c, g, or t
  misc_feature (1024)..(1024): n is a, c, g, or t
  misc_feature (1026)..(1026): n is a, c, g, or t
  misc_feature (1031)..(1033): n is a, c, g, or t
  misc_feature (1065)..(1065): n is a, c, g, or t
  misc_feature (1068)..(1068): n is a, c, g, or t
  misc_feature (1071)..(1071): n is a, c, g, or t
  misc_feature (1081)..(1081): n is a, c, g, or t
  misc_feature (1095)..(1095): n is a, c, g, or t
  misc_feature (1113)..(1113): n is a, c, g, or t
  misc_feature (1118)..(1118): n is a, c, g, or t
  misc_feature (1120)..(1120): n is a, c, g, or t
  misc_feature (1123)..(1124): n is a, c, g, or t
  misc_feature (1136)..(1136): n is a, c, g, or t
  misc_feature (1140)..(1140): n is a, c, g, or t
nantagagaaattactatgagaggatcgcatcaccatcaccatcacggatcctatttaggtgacactatagaatcgtcgacccacgcgtccgaaaaaatcattttgccaaggcacaggcgtcttgctctgttgaagcaagtcagtatccgagaaaactgctgttccctttgttgtgatgaggtagcagacacacaattgaagccatgtggacacagtgacctgtgcatggattgtgccttgcagctggagacctgcccattgtgtcgtaaagaaatagtatctagaatcagacagatttctcatatttcatgacacatgtgaagaggcatcgtggacttttttctactcaattccagccaatgttgaaaagaaaaagaaaaaaaaactctctaatcagttgtacacacattgaaacttatagccatggccagattttatgctaaaaatggtagtttgtcaaagacaaaattctcttagaatctaatccaacttgccagccctgagaaaatcccttttaaggccaaggaaagctgaatgctagcagccaggcctgtggtacttccatgagaaaccatagcagacaatgccctcccaagtactgaaatcacactggaatcccccttgttgggttcatttgattgtttaacacaggatgtgttgtgtcattctgaagtttttatttggggcagaagtctttatggagatgtaaatgacagcgtttctgggttatgcataacttctcactggtcagagacaccggtgtgtcaagcatggatattgcattgcaagacttgaatctataaaaattagaatcacacagtcagtactacaagccaaaacagagaacctgaaagaaggtgcacagactgtaagaaaaaacccaagtttggtgatatttcagtgattccaaagaacattcnanggttttttgggttggtttttttggtttttggggtttttttttttnactgcaaaaaaattggggggnattttncncattcnnagngnttctatccaatttcngnacccnnnttttaatgggggaaaaaatggttttacccatnganggnggaattcctnaaataacctgtaanggttaggttggaaaaaanttggntnttnngggaattttccngggnaccctc

SEQ ID NO: 14 - DNA, 1252 bp, Homo Sapiens
  misc_feature (5)..(5): n is a, c, g, or t
  misc_feature (873)..(873): n is a, c, g, or t
  misc_feature (939)..(939): n is a, c, g, or t
  misc_feature (966)..(966): n is a, c, g, or t
  misc_feature (1021)..(1021): n is a, c, g, or t
  misc_feature (1027)..(1027): n is a, c, g, or t
  misc_feature (1055)..(1055): n is a, c, g, or t
  misc_feature (1083)..(1083): n is a, c, g, or t
  misc_feature (1086)..(1086): n is a, c, g, or t
  misc_feature (1097)..(1097): n is a, c, g, or t
  misc_feature (1099)..(1099): n is a, c, g, or t
  misc_feature (1108)..(1109): n is a, c, g, or t
  misc_feature (1117)..(1117): n is a, c, g, or t
  misc_feature (1122)..(1122): n is a, c, g, or t
  misc_feature (1124)..(1124): n is a, c, g, or t
  misc_feature (1134)..(1134): n is a, c, g, or t
  misc_feature (1140)..(1140): n is a, c, g, or t
  misc_feature (1144)..(1144): n is a, c, g, or t
  misc_feature (1152)..(1152): n is a, c, g, or t
  misc_feature (1169)..(1169): n is a, c, g, or t
  misc_feature (1172)..(1172): n is a, c, g, or t
  misc_feature (1183)..(1183): n is a, c, g, or t
  misc_feature (1191)..(1191): n is a, c, g, or t
  misc_feature (1193)..(1193): n is a, c, g, or t
  misc_feature (1199)..(1200): n is a, c, g, or t
  misc_feature (1203)..(1203): n is a, c, g, or t
  misc_feature (1208)..(1208): n is a, c, g, or t
  misc_feature (1223)..(1223): n is a, c, g, or t
  misc_feature (1234)..(1234): n is a, c, g, or t
  misc_feature (1238)..(1239): n is a, c, g, or t
  misc_feature (1247)..(1247): n is a, c, g, or t
  misc_feature (1250)..(1250): n is a, c, g, or t
gaggnaattactatgagaggatcgcatcaccatcaccatcacggatcctatttaggtgacactatagaatcgtcgacccacgcgtccgggaagaggaagagagttacttttggagaggacttaagcccggaagtgtttgatgaatctttgccagcaaatactccattgcgtaaaggaggaacacctgtttgtaaaaaagacttcagtggtctcagttccctgctgcttgagcagtcacctgttcctgagccattacctcaaccagattttgatgacaagggggagaatcttgaaaacatagaaccacttcaagtatcatttgccgttctcagttctcctaataaatcatcaatctctgagaccctttcaggcactgatacctttagttcttcaaataaccatgagaaaatatcctctcctaaagttggtagaataacaaggacttctaacagaagaaatcaattggtcagtgttgtagaagagagtgtttgcaacttattgaatacagaagttcagccttgtaaagaaaagaaaattaataggaggaagtctcaagaaacaaagtgtacaaagagagcacttcctaagaagagtcaggttttaaaaagttgcagaaagaagaaaggaaagggaaagaaaagtgttcagaaatctttatatggggaaagagacattgcttctaagaagcccctcctcagtcctattcccgagctgcctgaagtccctgagatgacaccttccattccgagcatccgaagactgggttcaggttatttcagttcaaatggcaaactggaagaagtgaagactcctaaaaatccagtgaaaagaaaggatcttttgcgtcatgacccagatttgcatatgcatcanggctatgataaatatgatgtctctgaattctgctcttatataaaaagttcctcatcgcttggcaangctacttctgatgaagatccaaatacnaatataatgaacattaatggaaaataaaaatattccaaagcaaaaaataagtcanaagggnaaatgaaccaaaagctggaactgacagnccggttctggggctcctaaactgaaaancgngggcatccaanantcccaaacnngctctgancctgnancagggtcaanaatttncggnggggggcnaaaggcaaaaaaccttngcngttctttaaantttccccnanttaacnnaanggggnaaaaaaggagacttnttaggaccccnaaannaaacgcangcncc

SEQ ID NO: 15 - DNA, 743 bp, Homo Sapiens
  misc_feature (718)..(720): n is a, c, g, or t
  misc_feature (722)..(722): n is a, c, g, or t
  misc_feature (724)..(724): n is a, c, g, or t
  misc_feature (726)..(743): n is a, c, g, or t
tagagaaattactatgagaggatcgcatcaccatcaccatcacggatcctatttaggtgacactatagaatcgtcgacccacgcgtccgctggtcctctgcctgggcttcgaggttccttgggggcagcggctcatgctggttttcccactgcagtgtcttctgtggcttcagcgtcacctagtgcaggctgccattcaacaaacgcattgtcaacagtcaaccaaaagaaacccattggccaccataccctgaggactaaccctgacacagatgcccttccagatgccctcaatagtctaactgattccatcgccccagccttgggggagaagcactgctgcctatgcactccatttacagggttatagagtggaaagtcccacaatctttttcttctctattttcagaaaaacgttgacctcttggcgagaatgcaaagaagggaacgcttgcttatacactgttggtgaactgtcacccctacaactcagcttgcaaccagccctggccaccagtttccccacactgagctgaatatcggacatgcccatcttagacattccagcccattctgaaattccacatcgattcacctgacaaagtctgaagttccagggcaatttatctggaaaagcttacctggaatcacgtgtcatttcaaccaacaactgttgaagaggacgtggcattaaaaccaagggtatcaattatttatnnnananannnnnnnnnnnnnnnnnn

SEQ ID NO: 16 - DNA, 1261 bp, Homo Sapiens
  misc_feature (2)..(2): n is a, c, g, or t
  misc_feature (4)..(4): n is a, c, g, or t
  misc_feature (426)..(426): n is a, c, g, or t
  misc_feature (786)..(786): n is a, c, g, or t
  misc_feature (826)..(826): n is a, c, g, or t
  misc_feature (833)..(833): n is a, c, g, or t
  misc_feature (857)..(857): n is a, c, g, or t
  misc_feature (873)..(873): n is a, c, g, or t
  misc_feature (880)..(880): n is a, c, g, or t
  misc_feature (887)..(887): n is a, c, g, or t
  misc_feature (892)..(893): n is a, c, g, or t
  misc_feature (903)..(903): n is a, c, g, or t
  misc_feature (917)..(917): n is a, c, g, or t
  misc_feature (929)..(929): n is a, c, g, or t
  misc_feature (952)..(953): n is a, c, g, or t
  misc_feature (996)..(996): n is a, c, g, or t
  misc_feature (1008)..(1009): n is a, c, g, or t
  misc_feature (1018)..(1018): n is a, c, g, or t
  misc_feature (1027)..(1027): n is a, c, g, or t
  misc_feature (1041)..(1041): n is a, c, g, or t
  misc_feature (1053)..(1053): n is a, c, g, or t
  misc_feature (1071)..(1071): n is a, c, g, or t
  misc_feature (1084)..(1084): n is a, c, g, or t
  misc_feature (1089)..(1089): n is a, c, g, or t
  misc_feature (1094)..(1094): n is a, c, g, or t
  misc_feature (1103)..(1104): n is a, c, g, or t
  misc_feature (1106)..(1106): n is a, c, g, or t
  misc_feature (1116)..(1116): n is a, c, g, or t
  misc_feature (1128)..(1128): n is a, c, g, or t
  misc_feature (1130)..(1130): n is a, c, g, or t
  misc_feature (1132)..(1132): n is a, c, g, or t
  misc_feature (1134)..(1134): n is a, c, g, or t
  misc_feature (1144)..(1144): n is a, c, g, or t
  misc_feature (1161)..(1161): n is a, c, g, or t
  misc_feature (1165)..(1165): n is a, c, g, or t
  misc_feature (1183)..(1183): n is a, c, g, or t
  misc_feature (1185)..(1185): n is a, c, g, or t
  misc_feature (1193)..(1193): n is a, c, g, or t
  misc_feature (1195)..(1195): n is a, c, g, or t
  misc_feature (1206)..(1206): n is a, c, g, or t
  misc_feature (1208)..(1209): n is a, c, g, or t
  misc_feature (1220)..(1223): n is a, c, g, or t
  misc_feature (1227)..(1227): n is a, c, g, or t
  misc_feature (1231)..(1232): n is a, c, g, or t
  misc_feature (1241)..(1241): n is a, c, g, or t
  misc_feature (1248)..(1249): n is a, c, g, or t
  misc_feature (1258)..(1258): n is a, c, g, or t
anantagagaaattactatgagaggatcgcatcaccatcaccatcacggatcctatttaggtgacactatagaatcgtcgacccacgcgtccgcggattcacaagacccaggctgttccctacatatgtttcctcctccgacatcagttcatcagtcaatcaagccatgtgagagtggaggccttgtattccctattattcttgggcactctactccaagtaggaaaaggccaggaggtcctgttaaaggatgcactcagagcccgggctccctaacatatgagagtgctaaccagcaggtgtagacttttcaggagtgaagaatgaggcaggcattccaaacctggaccttcatcaccttttgtttcatctcaagacaattctgagggactgttttggagcgtgtctggaaggtgaaccttgaanaagagtgtgggctttgatgtgactcagttgagatctttcatggggaggcaggaattcaatgcccagaatctgggctggtgtctttgaggtcagtaggttgcgtctttgtatccaagtccattgttactaggttggaggctggagattctaaatggcttccagaccatctctctgattctctttgggagatggggtctgaaagacaatatcagtagttttgggaaattctagaaagtgtgcttggaaacgtgggaagagctcttgcctagtgcctaaatgctccatttgcagctctagccaagtagatacttggtaggtatagagccgggtttgcgtttatatcagcaaaacctatatcanagttgaaagaagtagtcaggaaaaagcgtcttggtcgcangccgggnaacatcttaaaagcaaacttctancctgctgactcttggncaatgantgttggnatccnngggctaaagngccttgaaatgcancatggaagcccnaatccatgaaatccaacttcccnnggaaaaaatgttaaaaattttttccagttttgaaccaaatccngggtggaaaccnncccatggcnattgggttngcctaacttttttnattaatttcagnggaaaaattcctaaaaancaaataaacattnaaagngcctnatttgaacnnanggattttttnttcccttccccnangncngaaaaaaaancccggccccaaattttnaaancttttttctccccttttngnagggtttncnaccttaattcncnnattggaaaaannnngttnaaanncaaaaaaanggccttnnccccttttnaca

SEQ ID NO: 17 - DNA, 1199 bp, Homo Sapiens
  misc_feature (745)..(745): n is a, c, g, or t
  misc_feature (831)..(831): n is a, c, g, or t
  misc_feature (923)..(923): n is a, c, g, or t
  misc_feature (960)..(960): n is a, c, g, or t
  misc_feature (986)..(986): n is a, c, g, or t
  misc_feature (989)..(989): n is a, c, g, or t
  misc_feature (997)..(997): n is a, c, g, or t
  misc_feature (1001)..(1001): n is a, c, g, or t
  misc_feature (1003)..(1003): n is a, c, g, or t
  misc_feature (1018)..(1018): n is a, c, g, or t
  misc_feature (1021)..(1021): n is a, c, g, or t
  misc_feature (1024)..(1024): n is a, c, g, or t
  misc_feature (1034)..(1034): n is a, c, g, or t
  misc_feature (1039)..(1040): n is a, c, g, or t
  misc_feature (1059)..(1059): n is a, c, g, or t
  misc_feature (1062)..(1062): n is a, c, g, or t
  misc_feature (1074)..(1074): n is a, c, g, or t
  misc_feature (1081)..(1081): n is a, c, g, or t
  misc_feature (1105)..(1105): n is a, c, g, or t
  misc_feature (1109)..(1109): n is a, c, g, or t
  misc_feature (1120)..(1121): n is a, c, g, or t
  misc_feature (1131)..(1132): n is a, c, g, or t
  misc_feature (1141)..(1141): n is a, c, g, or t
  misc_feature (1153)..(1153): n is a, c, g, or t
  misc_feature (1156)..(1156): n is a, c, g, or t
  misc_feature (1165)..(1166): n is a, c, g, or t
  misc_feature (1173)..(1173): n is a, c, g, or t
  misc_feature (1180)..(1180): n is a, c, g, or t
  misc_feature (1182)..(1182): n is a, c, g, or t
  misc_feature (1186)..(1187): n is a, c, g, or t
  misc_feature (1190)..(1190): n is a, c, g, or t
  misc_feature (1192)..(1193): n is a, c, g, or t
tagagaaattactatgagaggatcgcatcaccatcaccatcacggatcctatttaggtgacactatagaatcgtcgacccacgcgtccgcccacgcgtccggcttcatcaagcgggcaatgaagcggcacctggaggagatcgtgcacgtggagcagggccgtgaacagacgctgcgggaggtctttgagagcatgaatctcacggcctacgacctgagtgtggacacgctggatgtgcacgcggacaggaacactttccatcgctttgacaagtttaatgccaaatacaaccctattggggagtccgtcctccgagagatcttcatcaagacggacaacagggtatctgggaagtactttgctcacatcatcaaggaggtgatgtcagacctggaggagagcaaataccagaatgcagagctgcggctctccatttacgggcgctcgagggatgagtgggacaagctggcgcgctgggccgtcatgcaccgcgtgcactcccccaacgtgcgctggctggtgcaggtgccccgcctctttgatgtgtaccgtaccaagggccagctggccaacttccaggagatgctggagaacatcttcctgccactgttcgaggccactgtgcaccctgccagccacccggaactgcatctcttcttagagcacgtggatggttttgacagcgtggatgatgagtccaagcctgaaaaccatgtcttcaacctggagagccccctgcctgangcgtgggtggaggaggacaacccaccctatgcctactacctgtactacacctttgccaacatggccatgttgaaccacctgcgcangcagaggggcttccacacgtttgtgctgaggccacactgtgggggaggctgggcccatccaccacctggtgtcagccttcatgctggctganaacatttcccacgggctccttctgcgcaaggcccccngtcctgcagtacctgtactacctggnccnaaatcggnatcncnatgtctccgctcaanaanaanagcctctttntcaanntatcaccggaatcccccgnacnaatgtgccaaantccccgngggctacccctacaaaaccctgtncccnccaaatccaanncttttaacannttttgtccncaaccccccccngcnggggggccnnggaaggncccattntnccgnnccngnntggagg

SEQ ID NO: 18 - DNA, 1024 bp, Homo Sapiens
  misc_feature (510)..(510): n is a, c, g, or t
  misc_feature (751)..(751): n is a, c, g, or t
  misc_feature (777)..(777): n is a, c, g, or t
  misc_feature (799)..(799): n is a, c, g, or t
  misc_feature (806)..(806): n is a, c, g, or t
  misc_feature (816)..(816): n is a, c, g, or t
  misc_feature (819)..(819): n is a, c, g, or t
  misc_feature (828)..(828): n is a, c, g, or t
  misc_feature (830)..(830): n is a, c, g, or t
  misc_feature (832)..(832): n is a, c, g, or t
  misc_feature (845)..(845): n is a, c, g, or t
  misc_feature (853)..(853): n is a, c, g, or t
  misc_feature (866)..(866): n is a, c, g, or t
  misc_feature (902)..(902): n is a, c, g, or t
  misc_feature (905)..(905): n is a, c, g, or t
  misc_feature (917)..(918): n is a, c, g, or t
  misc_feature (920)..(920): n is a, c, g, or t
  misc_feature (935)..(935): n is a, c, g, or t
  misc_feature (953)..(954): n is a, c, g, or t
  misc_feature (960)..(960): n is a, c, g, or t
  misc_feature (969)..(969): n is a, c, g, or t
  misc_feature (971)..(971): n is a, c, g, or t
  misc_feature (974)..(974): n is a, c, g, or t
  misc_feature (997)..(998): n is a, c, g, or t
  misc_feature (1005)..(1005): n is a, c, g, or t
  misc_feature (1009)..(1010): n is a, c, g, or t
  misc_feature (1012)..(1013): n is a, c, g, or t
  misc_feature (1017)..(1017): n is a, c, g, or t
aatagagagaattactatgagaggatcgcatcaccatcaccatcacggatcctatttaggtgacactatagaatcgtcgacccacgcgtccgctctctgtgtgtttgtgtgtgtgtgtgcactcaagacctctaacagcctcgaagcctggggtggcatcccggccttgccattagcatgcctcatgcatcatcagatgacaaggacaaccctcatgacgaagcaacatgaattagggggcctcttggccttggtccaaaattgtcaatcagaaatgaacataaaggactccagagcagtgggactgtctgtcaaaagactctgtatatcttttgtggatgagttttgtgagagaacagagagaccattgtacctggcacaagggctcttcatgaaaagggagacttactgggaggtgcaagacagtggcatttctcctctcctcttgctgctcagcacagccctggattgcagccccgaggctgagaccagacaaagcccgggaggcanaaagatgctccaagaaccaacactatcaatgtctttgcaaatcctcacaggattcctgtgggtccagctttggaactgggaaacctttcttcggatccgcactcattccactgatgccagctgcccctgaaggatgccagtactgtggtgtgtgagtctcagcagccgcccacacgctcctaactctgctgcatggcagatgcctaggtggaaatagcaaaaacaaggcccaggctggggnccagggccagaaggggaaggccctgnattctcactcatgtgaaaatcntgaatcnctttccttgntcngtttggttnantnagtatcatctggnaaaataanttaaaaaaccaanaaaaaactctgtatctgtttcctagcatgggctgcnatngactctattaanncncatttcaaatttccnccctaaaattcctcttcnnctttcncaaccctcntntanaaggggtcctgggccacccctgnnaaaaacnctgnngnnccgnaccaccc

SEQ ID NO: 19 - DNA, 1065 bp, Homo Sapiens
  misc_feature (836)..(836): n is a, c, g, or t
  misc_feature (916)..(916): n is a, c, g, or t
  misc_feature (928)..(928): n is a, c, g, or t
  misc_feature (936)..(936): n is a, c, g, or t
  misc_feature (971)..(971): n is a, c, g, or t
  misc_feature (1001)..(1001): n is a, c, g, or t
  misc_feature (1003)..(1003): n is a, c, g, or t
  misc_feature (1016)..(1016): n is a, c, g, or t
  misc_feature (1018)..(1018): n is a, c, g, or t
  misc_feature (1033)..(1033): n is a, c, g, or t
  misc_feature (1037)..(1037): n is a, c, g, or t
  misc_feature (1040)..(1040): n is a, c, g, or t
  misc_feature (1043)..(1043): n is a, c, g, or t
  misc_feature (1046)..(1046): n is a, c, g, or t
  misc_feature (1052)..(1052): n is a, c, g, or t
  misc_feature (1055)..(1055): n is a, c, g, or t
  misc_feature (1057)..(1059): n is a, c, g, or t
  misc_feature (1061)..(1062): n is a, c, g, or t
  misc_feature (1064)..(1064): n is a, c, g, or t
tagagaaattactatgagaggatcgcatcaccatcaccatcacggatcctatttaggtgacactatagaatcgtcgacccacgcgtccgagaccatccgcatcgtctatgacatccccacaggcatccagggccctgagcaccccaaccccgggaagaagttcaccgcaagaggattccctcgccactgctatctacccaacaacgagaaaggccggaaggtgctgcggctgctcatcacggcctgggagagaagactcatcttcactatcggcacgtccaacaccacgggcgagtcggacaccgtggtgtggaacgagatccaccacaagaccgagtttggatccaacctcacgggccacggctacccggacgctagctacctagacaacgtgctggctgagctcacagcccagggcgtatccgaggctgcagccaaggcttgaggcccaaggctgcccaccttccctcctgctttgcccctggtccggcaaatgcctccttcgccaggtgtgtcctggtagcccaggttcagggctggggaggagcctgcggaaggggccgcagccattcaggggacctgcctggtggcagctgggatgaagagagatggcatgtcaggctggccccgaatcatagctccctgagagggccaagcagagagtactggaaacctccctaccaaaaagacagagacccgccccctcacacacaaacacacatgtcctgttgaactcatgcacgcacacccacgtgcctgtacttgcccccaggctggaagagaagagacagaaagaccccatgacccccccatgtggatccccatctgtgtctcanttgcatctgtacagccttgtctgcaaactggaggatgcggggcaagcccttaggggcctgccagggctcggggggcaaanagggactcgggnaaactcantgtaccccaaatgcctcacccattccgtgtcatcncccatgtctgccacccactgatgggcaatngngggcccatggggngnaaccccccaaatgantgancanttntanaaaaanggncnnnannanc

SEQ ID NO: 20 - DNA, 1232 bp, Homo Sapiens
  misc_feature (1)..(1): n is a, c, g, or t
  misc_feature (923)..(923): n is a, c, g, or t
  misc_feature (984)..(984): n is a, c, g, or t
  misc_feature (1017)..(1017): n is a, c, g, or t
  misc_feature (1022)..(1022): n is a, c, g, or t
  misc_feature (1035)..(1035): n is a, c, g, or t
  misc_feature (1050)..(1050): n is a, c, g, or t
  misc_feature (1059)..(1059): n is a, c, g, or t
  misc_feature (1061)..(1061): n is a, c, g, or t
  misc_feature (1076)..(1077): n is a, c, g, or t
  misc_feature (1090)..(1090): n is a, c, g, or t
  misc_feature (1095)..(1095): n is a, c, g, or t
  misc_feature (1099)..(1099): n is a, c, g, or t
  misc_feature (1107)..(1107): n is a, c, g, or t
  misc_feature (1121)..(1121): n is a, c, g, or t
  misc_feature (1123)..(1123): n is a, c, g, or t
  misc_feature (1127)..(1127): n is a, c, g, or t
  misc_feature (1133)..(1133): n is a, c, g, or t
  misc_feature (1139)..(1139): n is a, c, g, or t
  misc_feature (1141)..(1141): n is a, c, g, or t
  misc_feature (1148)..(1148): n is a, c, g, or t
  misc_feature (1165)..(1165): n is a, c, g, or t
  misc_feature (1175)..(1175): n is a, c, g, or t
  misc_feature (1178)..(1178): n is a, c, g, or t
  misc_feature (1181)..(1181): n is a, c, g, or t
  misc_feature (1186)..(1186): n is a, c, g, or t
  misc_feature (1212)..(1213): n is a, c, g, or t
  misc_feature (1215)..(1232): n is a, c, g, or t
naatagagaaattactatgagaggatcgcatcaccatcaccatcacggatcctatttaggtgacactatagaatcgtcgacccacgcgtccgccgggatcgtgagcaccacccagcgaggcggcaaagagctggggctccgcaactcagacatggactacatccagaccgacgccatcatcaactatggaaactcgggaggcccgttagtaaacctggacggtgaagtgattggaattaacactttgaaagtgacagctggaatctcctttgcaatcccatctgataagattaaaaagttcctcacggagtcccatgaccgacaggccaaaggaaaagccatcaccaagaagaagtatattggtatccgaatgatgtcactcacgtccagcaaagccaaagagctgaaggaccggcaccgggacttcccagacgtgatctcaggagcgtatataattgaagtaattcctgataccccagcagaagctggtggtctcaaggaaaacgacgtcataatcagcatcaatggacagtccgtggtctccgccaatgatgtcagcgacgtcattaaaagggaaagcaccctgaacatggtggtccgcaggggtaatgaagatatcatgatcacagtgattcccgaagaaattgacccataggcagaggcatgagctggacttcatgtttccctcaaagactctcccgtggatgacggatgaggactctgggctgctggaataggacactcaagacttttgactgccattttgtttgttcagtggagactccctggccaacagaatccttcttgatagtttgcaggcaaaacaaatgtaatgttgcagatccgcaggcagaagctctgcccttctgtatcctatgtatgcagtgtgctttttcttgccagcttgggccattcttgcttanacagtcagcatttgtctcctcctttaactgagtcatcatcttagtccaactaatgcagtcnatacaatgcgtaaataaaaaaaccccccggganccagnatgggactggtcntgtttgtgctttttncccagtcancncccaaggtcaatgcnnaaaacccccgggnggggnaacnctggcttntcaaacggccgaantngccncttttnagaatncnttggaantgggaaccccaagaccntgaatttganctnttnaaagncctttttaccctttggaaaaaaaaannannnnnnnnnnnnnnnnnn

SEQ ID NO: 21 - DNA, 1109 bp, Homo Sapiens
  misc_feature (920)..(920): n is a, c, g, or t
  misc_feature (967)..(967): n is a, c, g, or t
  misc_feature (1000)..(1000): n is a, c, g, or t
  misc_feature (1010)..(1010): n is a, c, g, or t
  misc_feature (1029)..(1030): n is a, c, g, or t
  misc_feature (1033)..(1033): n is a, c, g, or t
  misc_feature (1044)..(1044): n is a, c, g, or t
  misc_feature (1064)..(1064): n is a, c, g, or t
  misc_feature (1068)..(1068): n is a, c, g, or t
  misc_feature (1072)..(1072): n is a, c, g, or t
  misc_feature (1074)..(1074): n is a, c, g, or t
  misc_feature (1080)..(1080): n is a, c, g, or t
  misc_feature (1083)..(1083): n is a, c, g, or t
  misc_feature (1085)..(1085): n is a, c, g, or t
  misc_feature (1088)..(1088): n is a, c, g, or t
  misc_feature (1094)..(1094): n is a, c, g, or t
  misc_feature (1100)..(1100): n is a, c, g, or t
  misc_feature (1102)..(1102): n is a, c, g, or t
  misc_feature (1107)..(1107): n is a, c, g, or t
gagagattactatgagaggatcgcatcaccatcaccatcacggatcctatttaggtgacactatagaatcgtcgacccacgcgtccggcacctggaaggggaccctgaaagaatacgagagctgccacgaaggccgctgcccgctcatgctgaccgaatgtcccgcgtgcaaaggcctggtccgccttggtgaaaaggagcgccacctggagcacgagtgcccggagagaagcctgagctgccggcattgccgggcaccctgctgcggagcagacgtgaaggcgcaccacgaggtctgccccaagttccccttaacttgtgacggctgcggcaagaagaagatcccccgggagaagtttcaggaccacgtcaagacttgtggcaagtgtcgagtcccttgcagattccacgccatcggctgcctcgagacggtagagggtgagaaacagcaggagcacgaggtgcagtggctgcgggagcacctggccatgctactgagctcggtgctggaggcaaagcccctcttgggagaccagagccacgcggggtcagagctcctgcagaggtgcgagagcctggagaagaagacggccacttttgagaacattgtctgcgtcctgaaccgggaggtggagagggtggccatgactgccgaggcctgcagccggcagcaccggctggaccaagacaagattgaagccctgagtagcaaggtgcagcagctggagaggagcattggcctcaaggacctggcgatggctgacttggagcagaaggtcttggagatggaggcatccacctacgatggggtcttcatctggaagatctcagacttcgccaggaagcgccaggaagctgtggctggccgcatacccgccatcttctccccagccttctacaccagcaggtacggctacaanatgtgtctgcgtatctacctgaacggcgacggcaccgggcgaagaanacacctgtccctcttctttgtggtgatgaaggncccaatgacnccctgctgcggtggccttnnacnaaaaggtgacnttatgctgctcgaccaaaanaccnggancngtgatngancnttnagcccnagtgantnttctntt

SEQ ID NO: 22 - DNA, 1222 bp, Homo Sapiens
  misc_feature (1)..(1): n is a, c, g, or t
  misc_feature (725)..(725): n is a, c, g, or t
  misc_feature (887)..(887): n is a, c, g, or t
  misc_feature (897)..(897): n is a, c, g, or t
  misc_feature (903)..(903): n is a, c, g, or t
  misc_feature (930)..(930): n is a, c, g, or t
  misc_feature (964)..(964): n is a, c, g, or t
  misc_feature (985)..(985): n is a, c, g, or t
  misc_feature (1002)..(1002): n is a, c, g, or t
  misc_feature (1010)..(1010): n is a, c, g, or t
  misc_feature (1024)..(1024): n is a, c, g, or t
  misc_feature (1027)..(1027): n is a, c, g, or t
  misc_feature (1030)..(1030): n is a, c, g, or t
  misc_feature (1045)..(1045): n is a, c, g, or t
  misc_feature (1054)..(1054): n is a, c, g, or t
  misc_feature (1058)..(1058): n is a, c, g, or t
  misc_feature (1073)..(1073): n is a, c, g, or t
  misc_feature (1080)..(1080): n is a, c, g, or t
  misc_feature (1093)..(1093): n is a, c, g, or t
  misc_feature (1103)..(1103): n is a, c, g, or t
  misc_feature (1106)..(1106): n is a, c, g, or t
  misc_feature (1108)..(1108): n is a, c, g, or t
  misc_feature (1116)..(1116): n is a, c, g, or t
  misc_feature (1119)..(1119): n is a, c, g, or t
  misc_feature (1124)..(1124): n is a, c, g, or t
  misc_feature (1134)..(1134): n is a, c, g, or t
  misc_feature (1137)..(1137): n is a, c, g, or t
  misc_feature (1141)..(1141): n is a, c, g, or t
  misc_feature (1144)..(1144): n is a, c, g, or t
  misc_feature (1148)..(1148): n is a, c, g, or t
  misc_feature (1155)..(1155): n is a, c, g, or t
  misc_feature (1157)..(1157): n is a, c, g, or t
  misc_feature (1169)..(1169): n is a, c, g, or t
  misc_feature (1172)..(1172): n is a, c, g, or t
  misc_feature (1178)..(1178): n is a, c, g, or t
  misc_feature (1181)..(1181): n is a, c, g, or t
  misc_feature (1183)..(1183): n is a, c, g, or t
  misc_feature (1191)..(1191): n is a, c, g, or t
  misc_feature (1197)..(1197): n is a, c, g, or t
  misc_feature (1203)..(1203): n is a, c, g, or t
  misc_feature (1211)..(1211): n is a, c, g, or t
  misc_feature (1220)..(1220): n is a, c, g, or t
  misc_feature (1222)..(1222): n is a, c, g, or t
naaatagagaaattaactatgagaggatcgcatcaccatcaccatcacggatcctatttaggtgacactatagaatcgtcgacccacgcgtccgggggtcctggggcccggcgcgggtggccgccgcggcccctcgggctgcgtggggagggggcttccgcccctgttgtcattgctcctgcagccttttcgctgggactgcgcgacaccgccccccgaccgggtgcccgctgtgtgccaggccgggtgctgggcacggtcccgcgagtgccctataaggactgccaggcaataatgaaggttcttttactgaaggatgcgaaggaagatgactgtggccaggatccgtatatcagggaattaggattatatggacttgaagccactttgatccctgttttatcgtttgagtttttgtctcttcccagtttctctgagaagctttctcatcctgaagattacgggggactcatttttaccagccccagagcagtggaagcagcagagttatgtttggagcaaaacaataaaactgaagtctgggaaaggtctctgaaagaaaaatggaatgccaagtcagtgtatgtggttggaaatgctactgcttctctagtgagtaaaattggcctggatacagaaggagaaacctgtggaaatgcagaaaagcttgcagaatatatttgttccagggagtcctcagcactgcctcttctatttccctgtgnaaacctcaaaagagaaatcctgccaaaagcgctcaaggacaaagggattgccatggaaagcataactgtgtatcaaacagttgcacacccaggaatccaagggaacctgaacagctactatttcccagcaggggggttccagccagcatcacatttttttantccctctggncctcanatacagtctcaagcacatttcaagaanttatctggtgacaatatcgatcaaattaaatttngcagccaatcggcccccaccnacggcttccgcgctggnccgcccanggcctttctgtaanctncantgcaaaaaaaccccnccccacaancctngcccctggcatcagnaaaggtntccaaccccatgnaacctccctnggntnggctggcnctngatgnacccagcatncgnaagnctntcgngaactgntncctaaaatctgnccnaaactnaangnaacccctnaaaacnggaatngaactacntggggtggncn

SEQ ID NO: 23 - DNA, 1190 bp, Homo Sapiens
  misc_feature (1)..(1): n is a, c, g, or t
  misc_feature (721)..(721): n is a, c, g, or t
  misc_feature (728)..(728): n is a, c, g, or t
  misc_feature (734)..(734): n is a, c, g, or t
  misc_feature (759)..(759): n is a, c, g, or t
  misc_feature (765)..(765): n is a, c, g, or t
  misc_feature (774)..(774): n is a, c, g, or t
  misc_feature (795)..(795): n is a, c, g, or t
  misc_feature (802)..(802): n is a, c, g, or t
  misc_feature (812)..(812): n is a, c, g, or t
  misc_feature (816)..(816): n is a, c, g, or t
  misc_feature (830)..(830): n is a, c, g, or t
  misc_feature (832)..(832): n is a, c, g, or t
  misc_feature (839)..(839): n is a, c, g, or t
  misc_feature (856)..(856): n is a, c, g, or t
  misc_feature (862)..(862): n is a, c, g, or t
  misc_feature (873)..(873): n is a, c, g, or t
  misc_feature (880)..(880): n is a, c, g, or t
  misc_feature (883)..(883): n is a, c, g, or t
  misc_feature (886)..(886): n is a, c, g, or t
  misc_feature (888)..(888): n is a, c, g, or t
  misc_feature (890)..(890): n is a, c, g, or t
  misc_feature (893)..(893): n is a, c, g, or t
  misc_feature (896)..(896): n is a, c, g, or t
  misc_feature (901)..(901): n is a, c, g, or t
  misc_feature (905)..(905): n is a, c, g, or t
  misc_feature (924)..(924): n is a, c, g, or t
  misc_feature (929)..(929): n is a, c, g, or t
  misc_feature (933)..(933): n is a, c, g, or t
  misc_feature (941)..(941): n is a, c, g, or t
  misc_feature (963)..(963): n is a, c, g, or t
  misc_feature (968)..(968): n is a, c, g, or t
  misc_feature (973)..(973): n is a, c, g, or t
  misc_feature (981)..(981): n is a, c, g, or t
  misc_feature (984)..(984): n is a, c, g, or t
  misc_feature (1004)..(1004): n is a, c, g, or t
  misc_feature (1006)..(1006): n is a, c, g, or t
  misc_feature (1009)..(1009): n is a, c, g, or t
  misc_feature (1021)..(1021): n is a, c, g, or t
  misc_feature (1036)..(1036): n is a, c, g, or t
  misc_feature (1040)..(1040): n is a, c, g, or t
  misc_feature (1043)..(1043): n is a, c, g, or t
  misc_feature (1052)..(1053): n is a, c, g, or t
  misc_feature (1055)..(1055): n is a, c, g, or t
  misc_feature (1067)..(1067): n is a, c, g, or t
  misc_feature (1070)..(1070): n is a, c, g, or t
  misc_feature (1072)..(1072): n is a, c, g, or t
  misc_feature (1076)..(1076): n is a, c, g, or t
  misc_feature (1085)..(1085): n is a, c, g, or t
  misc_feature (1091)..(1091): n is a, c, g, or t
  misc_feature (1094)..(1094): n is a, c, g, or t
  misc_feature (1100)..(1100): n is a, c, g, or t
  misc_feature (1102)..(1102): n is a, c, g, or t
  misc_feature (1116)..(1116): n is a, c, g, or t
  misc_feature (1120)..(1120): n is a, c, g, or t
  misc_feature (1129)..(1129): n is a, c, g, or t
  misc_feature (1132)..(1132): n is a, c, g, or t
  misc_feature (1138)..(1138): n is a, c, g, or t
  misc_feature (1141)..(1141): n is a, c, g, or t
  misc_feature (1150)..(1150): n is a, c, g, or t
  misc_feature (1166)..(1166): n is a, c, g, or t
  misc_feature (1178)..(1178): n is a, c, g, or t
ntatgagaggatcgcatcaccatcaccatcacggatcctatttaggtgacactatagaatcgtcgacccacgcgtccgaatgttatgaatgtgggaaaaccttctgcttgaagtcagacctcacaatacatcagagaacgcacacaggggagaaaccctttgcatgtcctgaatgtgggaaattctttagccataagtcaaccctctctcaacattatagaacacacacgggggagaaaccctatgaatgtcatgaatgtggaaaaatcttttacaataaatcatacctaacaaaacataatagaacacatacaggggagaaaccctatgaatgtaatgaatgtggaaaaaccttctgccagaagtcacaactcactcagcatcagagaattcacataggggagaaaccctatgaatgtaatgagtgtggaaaagctttctgccataagtcagctctaattgtacatcagagaacccatacacaagaaaagccttataaatgtaacgaatgtggaaaatctttctgtgtgaagtcaggacttattttacatgagagaaagcacacgggggagaaaccctatgaatgcaatgaatgtgggaaatccttcagtcacaaatcatcactcacagtacattacagggctcacacaggagagaaatcttgtcagtgtaatgaatgtggaaaaatcttttaccgtaaatcagaccttgctaaacatcngagatcncatacnggggaaaagccctatgaatgtaacncatgcnggaaaaccntctctcaaaagtccaatctcnttgtacntccgagaacncccntaggagaaaaaccntntgaatgnaattggatattaaaaantttccngccccaagtcngcccccntantgncncnaantcntcccnctgngggaaaagggccggttganatccngganggttcaanaactatccccaaactccccttntgttnccccnaagtaacngtnggggaaaacccctaaacctncnccnccttttgggggncttttgttaggaaangaantcnggtggaaanncnaagggtaaaacnggncnaaancccccccantttttnganttgggnangttttggcaaactncaanaggatttgnttncgtttnccnggggaaaantgtccttttaaaatcnaagggaaatttntttaaaaaaaaa

SEQ ID NO: 24 - DNA, 1140 bp, Homo Sapiens
  misc_feature (896)..(896): n is a, c, g, or t
  misc_feature (978)..(978): n is a, c, g, or t
  misc_feature (983)..(983): n is a, c, g, or t
  misc_feature (990)..(990): n is a, c, g, or t
  misc_feature (995)..(995): n is a, c, g, or t
  misc_feature (1005)..(1005): n is a, c, g, or t
  misc_feature (1016)..(1016): n is a, c, g, or t
  misc_feature (1019)..(1019): n is a, c, g, or t
  misc_feature (1031)..(1031): n is a, c, g, or t
  misc_feature (1033)..(1033): n is a, c, g, or t
  misc_feature (1035)..(1035): n is a, c, g, or t
  misc_feature (1040)..(1040): n is a, c, g, or t
  misc_feature (1042)..(1042): n is a, c, g, or t
  misc_feature (1052)..(1052): n is a, c, g, or t
  misc_feature (1055)..(1056): n is a, c, g, or t
  misc_feature (1061)..(1061): n is a, c, g, or t
  misc_feature (1068)..(1068): n is a, c, g, or t
  misc_feature (1077)..(1077): n is a, c, g, or t
  misc_feature (1085)..(1085): n is a, c, g, or t
  misc_feature (1088)..(1088): n is a, c, g, or t
  misc_feature (1096)..(1097): n is a, c, g, or t
  misc_feature (1111)..(1111): n is a, c, g, or t
  misc_feature (1115)..(1115): n is a, c, g, or t
  misc_feature (1126)..(1126): n is a, c, g, or t
  misc_feature (1132)..(1132): n is a, c, g, or t
  misc_feature (1134)..(1134): n is a, c, g, or t
  misc_feature (1140)..(1140): n is a, c, g, or t
tagagaaattactatgagaggatcgcatcaccatcaccatcacggatcctatttaggtgacactatagaatcgtcgacccacgcgtccgcagcttcgcagacctctggcgcccggcgggttcccagttcccccgcttcttccgaggagacagcggaggcgaggccaccgggctgtcaggctgaagctccgtggcggccgggtcctgcacgcagagaagaccccagcgccggcgcggctcagggctgggcccacgggactccggacgcgccgcgaaagcgttgcgctcccggaggcgtccgcagctgctggctgctcatttgccggtgaccggaggctcggggccagcatggcccccacgctgcaacaggcgtaccggaggcgctggtggatggcctgcacggctgtgctggagaacctcttcttctctgctgtactcctgggctggggctccctgttgatcattctgaagaacgagggcttctattccagcacgtgcccagctgagagcagcaccaacaccacccaggatgagcagcgcaggtggccaggctgtgaccagcaggacgagatgctcaacctgggcttcaccattggttccttcgtgctcagcgccaccaccctgccactggggatcctcatggaccgctttggcccccgacccgtgcggctggttggcagtcctgcttcactgcgtcctgcaccctcatggccctggcctcccgggacgtggaagctctgtctccgttgatattcctggcgctgtccctgaatggctttggtggcatctgcctaacgttcacttcactcacgctgcccaacatgtttgggaacctgcgctccacgttaatggccctcatgattggctcttacgcctcttctgccattacgtttccangaaatcaagctgatctacgatgccggtgtggccttcgtggtcatcatgttcacctggtctggcctggcctgccttatctttntgaantgcaccntcaantggcccatcnaaaccttttcntgncccctgaggaantnanttacncnaaaaaaaatnaanntgaantgggctnggcccttgnaacaaaanggngaaaaggnnacctttttttaaancccnttttaaccccnatgggncnaaaagn

SEQ ID NO: 25 - DNA, 893 bp, Homo Sapiens
  misc_feature (1)..(2): n is a, c, g, or t
  misc_feature (870)..(874): n is a, c, g, or t
  misc_feature (877)..(878): n is a, c, g, or t
  misc_feature (880)..(883): n is a, c, g, or t
  misc_feature (886)..(893): n is a, c, g, or t
nnaatagagaaattactatgagaggatcgcatcaccatcaccatcacggatcctatttaggtgacactatagaatcgtcgacccacgcgtccgcccacgcgtccgcccacgcgtccggacggagaggaaacctgcgccctggcctctcactccgggagctcaggctccaagtcgggaggcgacaagatgttctccctcaagaagtggaacgcggtggccatgtggagctgggacgtggagtgcgatacgtgcgccatctgcagggtccaggtgatggatgcctgtcttagatgtcaagctgaaaacaaacaagaggactgtgttgtggtctggggagaatgtaatcattccttccacaactgctgcatgtccctgtgggtgaaacagaacaatcgctgccctctctgccagcaggactgggtggtccaaagaatcggcaaatgagagtggttagaaggcttcttagcgcagttgttcagagccctggtggatcttgtaatccagtgccctacaaaggctagaacactacaggggatgaattcttcaaataggagccgatggatctgtggtcctttgggactcatcaaagccttggtttagcattttgtcagttttatcttcagaaattctctgcgattaagaagataatttattaaaggtggtccttcctacctctgtggtgtgtgtcgcgcacacagcttagaagtgctataaaaaaggaaagagctccaaattgaatcacctttataatttacccatttctatacaacaggcagtggaagcagtttcagagaactttttgcatgcttatggttgatcagttaaaaaagaatgttacagtaacaaataaagtgcagtttaaaaaccccnnnnnaannannnnaannnnnnnn

SEQ ID NO: 26 - DNA, 934 bp, Homo Sapiens
tatgagaggatcgcatcaccatcaccatcacggatcctatttaggtgacactatagaatcgtcgacccacgcgtccgcggacgcgtgggtgctgttgccgccgcctggaggaggcggcggcggcagcgcgggaagtggcggcggcggcggcggcggcggggtgggtgtccccgggctgctagtaggttcagccggcgttgggggcgaccctagcctaagcagcctgccggccggggccgccctttgcctcaagtacggcgaaagcgcgagccggggctcggtggccgagagcagcggcggcgagcagagccccgacgacgacagcgacggtcgctgcgagctcgtgctgcgggccggagtagccgacccgcgggcctccccgggagcgggaggtggtggcgcgaaggcagccgagggctgctccaatgcccacctccacggcggcgccagcgtccccccggggggcctgggcggcggcggcggcgggggtagcagcagcggtagcagtggcggcggtggcggtagcggtagcggcagcggcagcggcggcagcagcagcagcagcagcagcagcagcaagaaatccaaagagcaaaaggcgctgcggcttaacatcaatgcccgagagcgccggcggatgcacgacctgaacgacgcgctggacgagctgcgcgcggtgatcccctacgcgcacagcccctcggtgcgaaagctctccaagatcgccacgctgctgctcgccaagaactacatcctcatgcaggcgcaggccctggaggagatgcggcgcctagtcgcctacctcaaccagggccaggccatctcggctgcctccctgcccagctcggcggctgcagcggcagcagctgctgccctgcacccggcgctcggcgcctacgagcaggcagccggctacccgttcagcgccggactg

SEQ ID NO: 27 - DNA, 1036 bp, Homo Sapiens
  misc_feature (1)..(1): n is a, c, g, or t
  misc_feature (836)..(836): n is a, c, g, or t
  misc_feature (903)..(903): n is a, c, g, or t
  misc_feature (931)..(931): n is a, c, g, or t
  misc_feature (935)..(935): n is a, c, g, or t
  misc_feature (953)..(953): n is a, c, g, or t
  misc_feature (964)..(964): n is a, c, g, or t
  misc_feature (966)..(966): n is a, c, g, or t
  misc_feature (969)..(970): n is a, c, g, or t
  misc_feature (973)..(973): n is a, c, g, or t
  misc_feature (978)..(978): n is a, c, g, or t
  misc_feature (988)..(990): n is a, c, g, or t
  misc_feature (1005)..(1005): n is a, c, g, or t
  misc_feature (1011)..(1013): n is a, c, g, or t
  misc_feature (1017)..(1017): n is a, c, g, or t
  misc_feature (1020)..(1020): n is a, c, g, or t
nttagagaaattactatgagaggatcgcatcaccatcaccatcacggatcctatttaggtgacactatagaatcgtcgacccacgcgtccgcccacgcgtccgcggacgcgtgggcagccagccggcacgcgggcaacctcacactgcacgccaacagcgtgcgcaagcggggcatgtccatcctgcgggaggtggacgagcagtaccacgcgctgctggagaagtacgaggagctgctgagcaagtgccggcagcacggggccggagtgcggcacgccggcgtgcagacctcgcgccccatctcccgggacagctcgtggagggacctgcgcgggggtgaggagggccagggtgaggtcaaggcaggagagaagagcctgagccagcacgtggaggccgtggacaagcggctggaacagagccagcccgagtacaaggcgctcttcaaagagatcttctccaggatccagaagaccaaggctgacatcaacgccaccaaagtcaagacgcacagcagcaagtgacccttctccggcctgcagcctcccccagggtggaagccgtggggtccctcaggcctgggcggtgcagcttccagagagcgagcgccctttagcggcctgccaccacagcacgcggcctcctgatccggaagcacgcagcatgttccctgctgagcggaggcagcccacctgtcctgcctcccaggagcccttggccacctcgcgccagcccaaaggcgcagctctgagttcaaagccaaatgtccccactaccccagggatcccccagctcccccagcccctggcttcctgaccctgcgcctcaccctcanactggtgaccaggcttctgaaagccattctggatcagttggcttttttttttttttttttggttaantttgttttttctaaaaaatttgcaatgnaagntctccttgaccccttgcncaactggaaananttnnaangggancccagggccnnntttttcagggtttcntggaannnccantgnttttccccaacctgat

SEQ ID NO: 28 - DNA, 1124 bp, Homo Sapiens
  misc_feature (893)..(893): n is a, c, g, or t
  misc_feature (942)..(942): n is a, c, g, or t
  misc_feature (996)..(996): n is a, c, g, or t
  misc_feature (1024)..(1024): n is a, c, g, or t
  misc_feature (1027)..(1028): n is a, c, g, or t
  misc_feature (1037)..(1037): n is a, c, g, or t
  misc_feature (1040)..(1040): n is a, c, g, or t
  misc_feature (1043)..(1044): n is a, c, g, or t
  misc_feature (1059)..(1059): n is a, c, g, or t
  misc_feature (1066)..(1066): n is a, c, g, or t
  misc_feature (1085)..(1085): n is a, c, g, or t
  misc_feature (1095)..(1095): n is a, c, g, or t
  misc_feature (1100)..(1100): n is a, c, g, or t
  misc_feature (1107)..(1107): n is a, c, g, or t
  misc_feature (1110)..(1110): n is a, c, g, or t
  misc_feature (1113)..(1116): n is a, c, g, or t
  misc_feature (1118)..(1124): n is a, c, g, or t
agagagattactatgagaggatcgcatcaccatcaccatcacggatcctatttaggtgacactatagaatcgtcgacccacgcgtccggtggacttggcggcagaggcagtgcggatccggcgttctccactgatcttttccaaggctgtacagacatggcggcggcttttcggaaggcggctaagtcccggcagcgggaacacagagagcgaagccagcctggctttcgaaaacatctgggcctgctggagaaaaagaaagattacaaacttcgtgcagatgactaccgtaaaaaacaagaatacctcaaagctcttcggaagaaggctcttgaaaaaaatccagatgaattctactacaaaatgactcgggttaaactccaggatggagtacatattattaaggagactaaggaagaagtaaccccagaacaactaaagctgatgagaactcaggacgtcaaatatatagaaatgaagagggttgcagaagctaagaaaatcgaaagactaaaatcagagctccatctgctggatttccaggggaagcaacagaacaagcatgtgttcttttttgacaccaaaaaggaagttgaacagtttgatgtcgcaactcacctgcaaacagccccggagctagtcgacagagtctttaataggcccaggatagagaccttgcagaaagaaaaagtgaaaggagttaccaatcagactggacttaagcgaatagctaaagaaaggcaaaagcagtataactgcctgacacagcggattgaacgagagaagaaattgttcgttattgctcagaaaattcaaacacgcaaagatcttatggataaaactcagaaagtgaaggtgaaaaaagaacggtgaactccccagctatttataantttcagagtcgtcgaaaacgttgacgtgttatagataagccttgtcatnctgtatcaaaaaatctgttgtcgttttctagtaacttcaaattccattactccnaatggccttggtttttccgggtttgtanccnnaaactaaanttntcnntctgacatttaaggnctttctntggacaaacattaaatccncccccccctnctgtnaaaaaanaanaannnnannnnnnn

SEQ ID NO: 29 - DNA, 1053 bp, Homo Sapiens
  misc_feature (776)..(776): n is a, c, g, or t
  misc_feature (812)..(812): n is a, c, g, or t
  misc_feature (821)..(821): n is a, c, g, or t
  misc_feature (829)..(829): n is a, c, g, or t
  misc_feature (839)..(839): n is a, c, g, or t
  misc_feature (867)..(867): n is a, c, g, or t
  misc_feature (874)..(874): n is a, c, g, or t
  misc_feature (886)..(886): n is a, c, g, or t
  misc_feature (890)..(890): n is a, c, g, or t
  misc_feature (905)..(905): n is a, c, g, or t
  misc_feature (916)..(916): n is a, c, g, or t
  misc_feature (940)..(940): n is a, c, g, or t
  misc_feature (947)..(947): n is a, c, g, or t
  misc_feature (949)..(949): n is a, c, g, or t
  misc_feature (951)..(951): n is a, c, g, or t
  misc_feature (957)..(957): n is a, c, g, or t
  misc_feature (959)..(959): n is a, c, g, or t
  misc_feature (965)..(965): n is a, c, g, or t
  misc_feature (968)..(968): n is a, c, g, or t
  misc_feature (979)..(979): n is a, c, g, or t
  misc_feature (984)..(984): n is a, c, g, or t
  misc_feature (987)..(987): n is a, c, g, or t
  misc_feature (991)..(991): n is a, c, g, or t
  misc_feature (996)..(996): n is a, c, g, or t
  misc_feature (1001)..(1001): n is a, c, g, or t
  misc_feature (1014)..(1014): n is a, c, g, or t
  misc_feature (1016)..(1017): n is a, c, g, or t
  misc_feature (1026)..(1026): n is a, c, g, or t
  misc_feature (1029)..(1029): n is a, c, g, or t
  misc_feature (1036)..(1036): n is a, c, g, or t
  misc_feature (1038)..(1038): n is a, c, g, or t
  misc_feature (1041)..(1041): n is a, c, g, or t
  misc_feature (1046)..(1046): n is a, c, g, or t
  misc_feature (1053)..(1053): n is a, c, g, or t
tagagaaattactatgagaggatcgcatcaccatcaccatcacggatcctatttaggtgacactatagaatcgtcgacccacgcgtccggggaacaccgggctgagggagtctgcagtcggctccgggaagccgcgcggcgacgggggaggccttcactaaaggggaaaaggaagagggggtcggccagtatccccgaaagagggctagggcgcatgaagaccagcgcagagctccacgagcaggaaaagcccccaagcagccccagggcgactggaccgggccgcttaggccacgcccggggaagagggcctgacgcgctgcggggcggggccgcggggccgggtcgcgcgagcagcggagcaccaagggaacggaaaatggcgcctcacggcccgggtagtcttacgaccctggtgccctgggctgccgccctgctcctcgctctgggcgtggaaagggctctggcgctacccgagatatgcacccaatgtccagggagcgtgcaaaatttgtcaaaagtggccttttattgtaaaacgacacgagagctaatgctgcatgcccgttgctgcctgaatcagaagggcaccatcttggggctggatctccagaactgttctctggaggaccctggtccaaactttcatcaggcacataccactgtcatcatagacctgcaagcaaaccccctcaaaggtgacttggccaacaccttccgtggctttactcagctccaaactctgatactgccacaacatgtcaactgtcctggangaattaatgcctggaatactatcacctcttatatanacaaccaantctgtcanggcaaaaaanctttgcaataacactggggacccaaaantgtgtcntgaaaatggatnttgngtacctgatggtcangtcttttgcantgtgttttgctgatggtttcatgnaaaaaantntntgcccnanggctcnttnccctgcttatnttttnggnattntgganccacnattttatccgttncnnttttgtttnggngaaccancnccnaaaanccaaaan

SEQ ID NO: 30 - DNA, 912 bp, Homo Sapiens
  misc_feature (2)..(2): n is a, c, g, or t
  misc_feature (346)..(346): n is a, c, g, or t
  misc_feature (366)..(366): n is a, c, g, or t
  misc_feature (455)..(455): n is a, c, g, or t
  misc_feature (484)..(484): n is a, c, g, or t
  misc_feature (490)..(490): n is a, c, g, or t
  misc_feature (495)..(495): n is a, c, g, or t
  misc_feature (504)..(504): n is a, c, g, or t
  misc_feature (537)..(537): n is a, c, g, or t
  misc_feature (637)..(637): n is a, c, g, or t
  misc_feature (666)..(666): n is a, c, g, or t
  misc_feature (678)..(678): n is a, c, g, or t
  misc_feature (698)..(698): n is a, c, g, or t
  misc_feature (721)..(721): n is a, c, g, or t
  misc_feature (730)..(730): n is a, c, g, or t
  misc_feature (740)..(740): n is a, c, g, or t
  misc_feature (748)..(748): n is a, c, g, or t
  misc_feature (755)..(755): n is a, c, g, or t
  misc_feature (781)..(781): n is a, c, g, or t
  misc_feature (790)..(790): n is a, c, g, or t
  misc_feature (792)..(792): n is a, c, g, or t
  misc_feature (794)..(794): n is a, c, g, or t
  misc_feature (799)..(799): n is a, c, g, or t
  misc_feature (803)..(803): n is a, c, g, or t
  misc_feature (821)..(822): n is a, c, g, or t
  misc_feature (846)..(846): n is a, c, g, or t
  misc_feature (848)..(848): n is a, c, g, or t
  misc_feature (855)..(855): n is a, c, g, or t
  misc_feature (858)..(858): n is a, c, g, or t
  misc_feature (862)..(863): n is a, c, g, or t
  misc_feature (868)..(868): n is a, c, g, or t
  misc_feature (872)..(872): n is a, c, g, or t
  misc_feature (878)..(879): n is a, c, g, or t
  misc_feature (881)..(881): n is a, c, g, or t
  misc_feature (890)..(890): n is a, c, g, or t
  misc_feature (899)..(899): n is a, c, g, or t
  misc_feature (905)..(905): n is a, c, g, or t
  misc_feature (907)..(907): n is a, c, g, or t
antagagaaattactatgagaggatcgcatcaccatcaccatcacggatcctatttaggtgacactatagaatcgtcgacccacgcgtccgcccacgcgtccggaaagtcccactcgccctcggcttctccctgcccggccgccggtgtcccgcccgccgcctccccgcgcagcccggcccgacccgcggcgatggcccagcccggggacccgcggcgcctctgcaggctggtgcaggagggccggctgcgcgccctgaaggaggagctgcaggcggccgggggctgcccggggccggccggggataccctcctgcactgcgccgcgcgccacgggcatcgggacntgctggcctatctggccgangcctggggcatggacatcgaggtcaccaaccgagactacaagcggcctctgcacgaggcggcctccatgggccaccgagactgcgtgcnctacctgctgggccggggggcagcggtcnactgcntgaanaaggccgantggactcctctgatgatggcctgcacaaggaanaacctgggggtgatccaggagctggtggaacatggcgccaatccactcctgaagaacaaagatggctggaacagtttccacattgccagtcgagaaggcnaccctctgatcctccaagtacctgctcantgtttgcccagngtgccctggaatacagagancaaaattagaaggactcctctgnatactgcancaatgcatgnaccatttngaggcantcaaagtgcttctttaagaggtgccnatatgaacnanantacanaaanaattgttggcgtcaccgnnttgatggaactcaattcaattttntncacatcnaantctnntaagnctgntccttnnantaaaaatgnggctttgcntttcananaaaaa

SEQ ID NO: 31 - DNA, 1301 bp, Homo Sapiens
  misc_feature (800)..(800): n is a, c, g, or t
  misc_feature (867)..(867): n is a, c, g, or t
  misc_feature (884)..(884): n is a, c, g, or t
  misc_feature (1001)..(1001): n is a, c, g, or t
  misc_feature (1004)..(1004): n is a, c, g, or t
  misc_feature (1007)..(1007): n is a, c, g, or t
  misc_feature (1014)..(1014): n is a, c, g, or t
  misc_feature (1022)..(1022): n is a, c, g, or t
  misc_feature (1045)..(1045): n is a, c, g, or t
  misc_feature (1052)..(1052): n is a, c, g, or t
  misc_feature (1066)..(1066): n is a, c, g, or t
  misc_feature (1077)..(1077): n is a, c, g, or t
  misc_feature (1089)..(1090): n is a, c, g, or t
  misc_feature (1099)..(1099): n is a, c, g, or t
  misc_feature (1103)..(1103): n is a, c, g, or t
  misc_feature (1110)..(1110): n is a, c, g, or t
  misc_feature (1112)..(1112): n is a, c, g, or t
  misc_feature (1118)..(1118): n is a, c, g, or t
  misc_feature (1120)..(1120): n is a, c, g, or t
  misc_feature (1128)..(1128): n is a, c, g, or t
  misc_feature (1138)..(1138): n is a, c, g, or t
  misc_feature (1143)..(1143): n is a, c, g, or t
  misc_feature (1164)..(1164): n is a, c, g, or t
  misc_feature (1172)..(1172): n is a, c, g, or t
  misc_feature (1196)..(1196): n is a, c, g, or t
  misc_feature (1198)..(1198): n is a, c, g, or t
  misc_feature (1209)..(1209): n is a, c, g, or t
  misc_feature (1216)..(1216): n is a, c, g, or t
  misc_feature (1218)..(1218): n is a, c, g, or t
  misc_feature (1230)..(1230): n is a, c, g, or t
  misc_feature (1237)..(1237): n is a, c, g, or t
  misc_feature (1257)..(1257): n is a, c, g, or t
  misc_feature (1259)..(1259): n is a, c, g, or t
  misc_feature (1264)..(1264): n is a, c, g, or t
  misc_feature (1266)..(1267): n is a, c, g, or t
  misc_feature (1274)..(1277): n is a, c, g, or t
  misc_feature (1281)..(1281): n is a, c, g, or t
  misc_feature (1291)..(1291): n is a, c, g, or t
  misc_feature (1293)..(1293): n is a, c, g, or t
tagagaaattactatgagaggatcgcatcaccatcaccatcacggatcctatttaggtgacactatagaatcgtcgacccacgcgtccgggagagtcgagggaggtgacgcgcgctgccggggcgaggttgcgaggggcggtgttgaagaatgtgtgggcgaacatcctgtcacttacctagagatgttctcacgagagcttgcgcctaccaggatcggcggggccagcagcggctcccggagtggagggaccctgataagtactgcccctcttacaacaagagtcctcaatccaacagcccagtgcttctgtctcgactgcactttgagaaggatgcagactcatctgagcgtatcattgctcccatgcgctggggcttggtcccttcttggttcagaaagtgatccttccaagctgcagttcaatactaccaactgtcgtagtgataccgtaatggagaaacggtcatttaaggtgcctctgggaaagggaagacgctgtgtcgttttagcagatggattctatgagtggcagcgatgtcagggaacaaaccagaggcagccatacttcatctattttcctcaaatcaagacagagaagtcaggtagcattggtgctgcagatagtcctgagaactgggagaaagtctgggacaactggaggctgctgacaatggccgggatctttgactgctgggagcccccagagggaggagatgtcctgtattcctataccatcatcacagtggattcctgcaaaggcttgagtgacatccaccacaggatgcctgccatattanatggagaggaaggcagtttctaaatggcttgactttggtgaagtctcaactcaggaagctctgaaanttaatccaccccaacanagaaacatcaccttccatgcagtctcttctgtggtgaacaactcgcgaaaacaaacactcctgaatgtctggctcctgtcgacttggtggtcaaaaagaactcagggcaagtggcantanccnaaaaganttttgcantggttggccccaaaagtcccccnaaaaggnaaaactcaaaaacncctccaaaagnaaaaatccaaannttcccccangggnccagtcnanttcccncnaaaaaatnccctcccccnccaanaaaaggccctgcaggaatccnaaaaacanggcctaaaaccggaaaaaaaaagnanaaacctgtggnccaaccntnctttaaccccgnggaaccnggaattttcaaaaacaaagncnagggncnnccccccnnnnttcnaaaaaaaggncncaaaaatt

SEQ ID NO: 32 - DNA, 1278 bp, Homo Sapiens
  misc_feature (916)..(916): n is a, c, g, or t
  misc_feature (928)..(928): n is a, c, g, or t
  misc_feature (942)..(942): n is a, c, g, or t
  misc_feature (973)..(973): n is a, c, g, or t
  misc_feature (982)..(982): n is a, c, g, or t
  misc_feature (994)..(994): n is a, c, g, or t
  misc_feature (1027)..(1027): n is a, c, g, or t
  misc_feature (1042)..(1042): n is a, c, g, or t
  misc_feature (1044)..(1044): n is a, c, g, or t
  misc_feature (1052)..(1052): n is a, c, g, or t
  misc_feature (1058)..(1058): n is a, c, g, or t
  misc_feature (1065)..(1065): n is a, c, g, or t
  misc_feature (1079)..(1079): n is a, c, g, or t
  misc_feature (1087)..(1087): n is a, c, g, or t
  misc_feature (1089)..(1089): n is a, c, g, or t
  misc_feature (1097)..(1097): n is a, c, g, or t
  misc_feature (1103)..(1103): n is a, c, g, or t
  misc_feature (1108)..(1108): n is a, c, g, or t
  misc_feature (1125)..(1125): n is a, c, g, or t
  misc_feature (1131)..(1131): n is a, c, g, or t
  misc_feature (1133)..(1133): n is a, c, g, or t
  misc_feature (1139)..(1139): n is a, c, g, or t
  misc_feature (1154)..(1154): n is a, c, g, or t
  misc_feature (1163)..(1164): n is a, c, g, or t
  misc_feature (1175)..(1175): n is a, c, g, or t
  misc_feature (1180)..(1180): n is a, c, g, or t
  misc_feature (1187)..(1189): n is a, c, g, or t
  misc_feature (1198)..(1198): n is a, c, g, or t
  misc_feature (1203)..(1204): n is a, c, g, or t
  misc_feature (1211)..(1211): n is a, c, g, or t
  misc_feature (1217)..(1217): n is a, c, g, or t
  misc_feature (1233)..(1233): n is a, c, g, or t
  misc_feature (1235)..(1235): n is a, c, g, or t
  misc_feature (1239)..(1239): n is a, c, g, or t
  misc_feature (1241)..(1241): n is a, c, g, or t
  misc_feature (1247)..(1247): n is a, c, g, or t
  misc_feature (1250)..(1250): n is a, c, g, or t
  misc_feature (1257)..(1257): n is a, c, g, or t
  misc_feature (1261)..(1261): n is a, c, g, or t
  misc_feature (1276)..(1276): n is a, c, g, or t
  misc_feature (1278)..(1278): n is a, c, g, or t
tagagaaattactatgagaggatcgcatcaccatcaccatcacggatcctatttaggtgacactatagaatcgtcgacccacgcgtccgcccacgcgtccgaacggcttcagccccgaatgctcgcatctcccactggacggcgacgaaggcggtggccgtgcgagcgcaggactgggcggcctgtgtgggggtgtgagccgcggtgcccaaggctgcgccggcgaggggaagccgcgcggccggccggccgactagggtttgaagactgcttcattctgcctctagtaccagcggtttctctgttctgtgatcaatgtgattcacaggaactccttaagtaacaaacgaaatgagccaggggcgtggaaaatatgacttctatattggtctgggattggctatgagctccagcattttcattggaggaagtttcattttgaaaaaaaagggcctccttcgacttgccaggaaaggctctatgagagcaggtcaaggtggccatgcatatcttaaggaatggttgtggtgggctggactgctgtcaatgggagctggtgaggtggccaacttcgctgcgtatgcgtttgcaccagccactctagtgactccactaggagctctcagcgtgctagtaagtgccattctttcttcatactttctcaatgaaagacttaatcttcatgggaaaattgggtgtttgctaagtattctaggatctacagttatggtcattcatgctccaaaggaagaggagattgagactttaaatgaaatgtctcacaagctaggtgatccaggttttgtggtctttgcaacccttgtggtcattgtggccttgatattaatcttcgtggtgggtcctcgccatggacagacaaacattcttgtgtacataacaatctgctctgtaatcngcgcgttttcantctcctgtgtgaanggcctgggcattgctatcaaggaactgtttngcagggaancctgtgctgcgncatccccctggcttggattctgctgctgaaccncatcgtctgtgtgancncccaaatnattacntaaatanggccctggaaaatncaaccctncnttgggacnccaaanattangtattctttaaacatcnttttantngtccanctttcttttaagaanggcaaaaanncctgtgaaaangcctnggacttnnnggcttcttnaaacnntgggggnaatttnttgcagccttaaaaancncttnancaaaanttncctgttntttnaaaaaaaaaaaaaanan

SEQ ID NO: 33 - DNA, 764 bp, Homo Sapiens
tgagaggatcgcatcaccatcaccatcacggatcctatttaggtgacactatagaatcgtcgacccacgcgtccgcccacgcgtccgcagaaagtgaaatgagaacatcacatgaagccagaggtgcccgggaagaacccaccgtccagcaggcacagcgtcggtcagctgtctttctgtcctttaagtccccaattccatgtctgcccttgcgctgggagcagcaaagcaaacttcttccaactgtcgcaggaatccctgccagtaaagtttccaaatggagcacagacgaggtgtcagaatttatacagagcttacctgggtgtgaagaacatggaaaggtatttaaagatgaacaaattgatggagaagcatttctacttatgactcaaacagacattgttaaaattatgagcattaaactgggccctgctctcaaaattttcaattccatcctgatgttcaaagctgcagagaagaattctcacaatgaactttgaagatggtgaattctgaataccatcagcattctgctttaaagctcatgttttattcaaagcacaaggacggttataactcctaagtgagaagtctccaaaactcaaaagagcaacactatcggattatttatattactcaagagacaatatatatgaattcttatgaaagtgcttgagcttttaaccaggtactgtctaacaacagtcatcttttggttctgttcactgagctaaatttatctttgtaaatctttttgagtctgg

SEQ ID NO: 34 - DNA, 882 bp, Homo Sapiens
tgagaggtcgcatcaccatcaccatcacggatcctatttaggtgacactatagaatcgtcgacccacgcgtccggagggagcagcgtcacgggcgcccggcccgttaaaacgctgctggctggagccacctccctccctgcagcccgcaacgggaatggagtaaagggagacccgtcgacctggccacggggatcagcgatggaattaaagcaatctttgtccacccatctggaagccgagaagcctctgaggcgctatggggcggtggaggagacggcttggaaaacggagagactggggagaaatcagctggacatcatctccatggcggagacaaccatgatgccagaggagattgagctggagatggcaaaaattcagcgtctccgggaagtcttggtccgccgggagtctgagctcaggttcatgatggatgacatccagctctgcaaggacatcatggacttgaagcaggagctgcagaacttggtcgccatcccagaaaaagaaaaaaccaaactgcagaagcagagagaggatgagctaatccagaagatccacaaactggtgcagaagagagacttcctggtggacgatgcggaggtcgagcggttaagggagcaagaagaagacaaggaaatggctgatttcctgagaatcaagttaaaacctctagacaaagtaaccaaatctccagccagctcccgggcagagaagaaagcagagcccccacctagcaagcccacggtggccaagacggggctggcactgatcaaggattgttgcggggccacccagtgcaacatcatgtagcccccacgtggggtgccctgggccatggggacccccccccaccctcttgtctttatagcccccatttc

SEQ ID NO: 35 - DNA, 1135 bp, Homo Sapiens
  misc_feature (1)..(2): n is a, c, g, or t
  misc_feature (4)..(4): n is a, c, g, or t
  misc_feature (13)..(13): n is a, c, g, or t
  misc_feature (41)..(41): n is a, c, g, or t
  misc_feature (792)..(792): n is a, c, g, or t
  misc_feature (919)..(919): n is a, c, g, or t
  misc_feature (926)..(926): n is a, c, g, or t
  misc_feature (941)..(941): n is a, c, g, or t
  misc_feature (958)..(958): n is a, c, g, or t
  misc_feature (963)..(963): n is a, c, g, or t
  misc_feature (967)..(967): n is a, c, g, or t
  misc_feature (973)..(973): n is a, c, g, or t
  misc_feature (980)..(981): n is a, c, g, or t
  misc_feature (987)..(987): n is a, c, g, or t
  misc_feature (991)..(991): n is a, c, g, or t
  misc_feature (997)..(997): n is a, c, g, or t
  misc_feature (999)..(999): n is a, c, g, or t
  misc_feature (1003)..(1003): n is a, c, g, or t
  misc_feature (1015)..(1015): n is a, c, g, or t
  misc_feature (1024)..(1024): n is a, c, g, or t
  misc_feature (1030)..(1030): n is a, c, g, or t
  misc_feature (1049)..(1049): n is a, c, g, or t
  misc_feature (1060)..(1060): n is a, c, g, or t
  misc_feature (1067)..(1067): n is a, c, g, or t
  misc_feature (1069)..(1069): n is a, c, g, or t
  misc_feature (1077)..(1077): n is a, c, g, or t
  misc_feature (1080)..(1080): n is a, c, g, or t
  misc_feature (1092)..(1092): n is a, c, g, or t
  misc_feature (1098)..(1098): n is a, c, g, or t
  misc_feature (1102)..(1103): n is a, c, g, or t
  misc_feature (1109)..(1111): n is a, c, g, or t
  misc_feature (1127)..(1127): n is a, c, g, or t
  misc_feature (1131)..(1131): n is a, c, g, or t
  misc_feature (1133)..(1133): n is a, c, g, or t
nngnattagaggnaaattactatgagaggatcgcatccccntcaccatcacgggatcctatttaggtgacacctatagaatcgtcgacccacgcggtccgcccacgcgtccgaaccctacaaatgtgaagaatgtggcaaagcttttaaccagtcctcaacccttactagacataagatagttcatactggagagaaaccctacaaatgtgaagaatgtggtaaagcctttaaacggtccacaactcttactaaacataagagaatttatactaaagagaaaccatacaaatgtgaagaatgtggaaaagcctttagtgtattctcaacccttactaaacataagataattcatactggagcaaaaccttacaaatgtgaagaatgtggcagtgcctttagggcattctcaacccttactgaacataagagagttcatactggagagaaaccttacaaatgcaatgaatgtggtaaagcctttaactggtcctcaactcttactaaacataagagaattcatactggagagaagccctacaaatgtgaagaatgtggcaaagcttttaaccggtcctcaaaccttactcgacataagaaaattcatactggagagaaaccatacaaacctaaaagatgtgacagtgcttttgacaacaccccaaacttttctagacataaaagaaatcatatgggtgagaaatcctagaaatgtgaagaatgtgacaaagcctttaagcggttgtcacacttgattgtatataagataattcatactggagaaaactcccanaagtgtgacaaatgtgacaaacatttaattaattctcataccttattgcacaggaaagcaatttatacttgagaaaaattgtataaaaaaatgggaaaaagtccatttaatatccggctccatatcnttaaccntccagcgagttggtnattttaataaaaagccnttatncaanggaaanttactgnncaaaanatcntttccnancaanataagccctgcnaagggccancagaantattttttttgaaaaaaanccttaaaagtnccaaggngnttggagcnccnttgtttggatcnaaaaancttnntggaannncttttggtacccaaanaaanancc

SEQ ID NO: 36 - DNA, 1243 bp, Homo Sapiens
  misc_feature (921)..(921): n is a, c, g, or t
  misc_feature (936)..(936): n is a, c, g, or t
  misc_feature (940)..(940): n is a, c, g, or t
  misc_feature (949)..(949): n is a, c, g, or t
  misc_feature (952)..(952): n is a, c, g, or t
  misc_feature (966)..(966): n is a, c, g, or t
  misc_feature (972)..(972): n is a, c, g, or t
  misc_feature (1001)..(1001): n is a, c, g, or t
  misc_feature (1046)..(1046): n is a, c, g, or t
  misc_feature (1079)..(1079): n is a, c, g, or t
  misc_feature (1082)..(1082): n is a, c, g, or t
  misc_feature (1097)..(1097): n is a, c, g, or t
  misc_feature (1107)..(1107): n is a, c, g, or t
  misc_feature (1110)..(1110): n is a, c, g, or t
  misc_feature (1112)..(1112): n is a, c, g, or t
  misc_feature (1119)..(1119): n is a, c, g, or t
  misc_feature (1124)..(1124): n is a, c, g, or t
  misc_feature (1132)..(1132): n is a, c, g, or t
  misc_feature (1138)..(1138): n is a, c, g, or t
  misc_feature (1146)..(1146): n is a, c, g, or t
  misc_feature (1163)..(1163): n is a, c, g, or t
  misc_feature (1166)..(1166): n is a, c, g, or t
  misc_feature (1170)..(1170): n is a, c, g, or t
  misc_feature (1172)..(1172): n is a, c, g, or t
  misc_feature (1184)..(1184): n is a, c, g, or t
  misc_feature (1192)..(1192): n is a, c, g, or t
  misc_feature (1194)..(1195): n is a, c, g, or t
  misc_feature (1201)..(1201): n is a, c, g, or t
  misc_feature (1207)..(1208): n is a, c, g, or t
  misc_feature (1224)..(1224): n is a, c, g, or t
  misc_feature (1233)..(1233): n is a, c, g, or t
  misc_feature (1236)..(1236): n is a, c, g, or t
  misc_feature (1238)..(1238): n is a, c, g, or t
tagagaaattactatgagaggatcgcatcaccatcaccatcacggatcctatttaggtgacactatagaatcgtcgacccacgcgtccgcggacgcgtgggatggagagcttcagtctttacgacctatattaggtgatttttcaaatgctcacatgataatgtacagtgaaaaaaactttggatccaaaggttccagtattgatgtattgggaattgttgctaatttaaaggagactggatatggagtgaagacacagtctattaatgtactgagtggagtatgggtagcctatgaaaatcctgacttcacaggagaacagtatatactggataaaggattttataccagttttgaggactggggaggcaaaaattgtaagatctcttctgttcaacctatatgtttggattctttcactggcccaaggagacgaaatcagattcacttgttttcagaaccacagtttcaaggtcacagtcaaagttttgaagaaacaacaagtcaaattgatgattcattttctaccaagtcttgcagagtttcaggaggcagctgggttgtatatgatggagaaaatttcactggtaatcaatacgtgttggaagaaggccattatccttgtctgtctgcaatgggatgcccgcctggagcaactttcaagtctcttcgttttatagatgttgaattttctgaaccaacaattattctctttgaaagagaagacttcaaaggaaaaaagattgaacttaatgcagaaactgtcaatctccgatccctgggattcaacacacaaatacgctctgttcaggttattggtggcatatgggttacttatgaatatggcagttacagagggcgacagttcctattgtcacctgcagaagtacctaattggtatgaattcagtggctgtcgccnaataggttctctacnaccntttgttcanaancgaatttatttcanacttcnaaacaagcaacagggttatcctgtcaccnatggaacttaaagatctgaacctctgaagaacagtcatggagagncggcccagacaattggacttcagaggagttcangcngaaccaaaacgcgcngacatgggcnccngnactcggnccacnagccgccngacaangcgacccntcggactgatccagcgnttnccantnaccattttttantaaggggncnngaaaanaacctnnccccgccaaaaatacnggggaccgnccncnaaaaa

SEQ ID NO: 37 - DNA, 1185 bp, Homo Sapiens
  misc_feature (847)..(847): n is a, c, g, or t
  misc_feature (938)..(939): n is a, c, g, or t
  misc_feature (941)..(941): n is a, c, g, or t
  misc_feature (949)..(949): n is a, c, g, or t
  misc_feature (982)..(982): n is a, c, g, or t
  misc_feature (991)..(991): n is a, c, g, or t
  misc_feature (1002)..(1002): n is a, c, g, or t
  misc_feature (1011)..(1011): n is a, c, g, or t
  misc_feature (1023)..(1024): n is a, c, g, or t
  misc_feature (1031)..(1031): n is a, c, g, or t
  misc_feature (1036)..(1036): n is a, c, g, or t
  misc_feature (1040)..(1040): n is a, c, g, or t
  misc_feature (1045)..(1045): n is a, c, g, or t
  misc_feature (1056)..(1056): n is a, c, g, or t
  misc_feature (1060)..(1060): n is a, c, g, or t
  misc_feature (1062)..(1062): n is a, c, g, or t
  misc_feature (1088)..(1088): n is a, c, g, or t
  misc_feature (1101)..(1101): n is a, c, g, or t
  misc_feature (1113)..(1113): n is a, c, g, or t
  misc_feature (1120)..(1120): n is a, c, g, or t
  misc_feature (1126)..(1126): n is a, c, g, or t
  misc_feature (1131)..(1131): n is a, c, g, or t
  misc_feature (1133)..(1134): n is a, c, g, or t
  misc_feature (1136)..(1136): n is a, c, g, or t
  misc_feature (1140)..(1140): n is a, c, g, or t
  misc_feature (1154)..(1154): n is a, c, g, or t
  misc_feature (1158)..(1158): n is a, c, g, or t
  misc_feature (1169)..(1170): n is a, c, g, or t
  misc_feature (1174)..(1174): n is a, c, g, or t
  misc_feature (1179)..(1179): n is a, c, g, or t
  misc_feature (1182)..(1182): n is a, c, g, or t
  misc_feature (1185)..(1185): n is a, c, g, or t
gagagattactatgagaggatcgcatcaccatcaccatcacggatcctatttaggtgacactatagaatcgtcgacccacgcgtccgcccacgcgtccgcccacgcgtccggcgcgtcggagccgctgagaaagcgcagagaaggcgggccccgtctgaggtctggcagtcagagacagccgggcgcccacggcccgagcgcccacggcagcaccatgcccgcactcctggagcgccccaagctttccaacgccatggccagggcgctgcaccggcacattatgatggagcgggagcgcaagcggcaggaggaagaagaggtggataagatgatggaacagaagatgaaggaagaacaggagagaaggaagaaaaaggagatggaagagagaatgtcattagaggagaccaaggaacaaattctgaagttggaggagaagcttttggctctacaggaagagaagcaccagcttttcctgcagctcaagaaagttttacatgaggaagaaaaacggaggcgaaaggaacagagtgacctgaccaccctaacatcagctgcataccagcagagcctgactgttcacacaggaactcatctcctcagcatgcaggggagccctggaggacacaatcgcccaggcaccctcatggcagctgacagagccaaacaaatgtttggaccccaagtgcttacgacccggcactacgtgggctcagcagctgcttttgcagggacaccagagcatggacaattccaaggcagtcctggtggtgcctatgggactgctcagcccccacctcactatgggcccacacagccagcttatagtcctagtcagcagctcanagctccttcggcattccctgcagtgcagtacctatctcagccacagccacagccctatgctgtgcatggccccttttcacccccttcaaanngntttcctcngcctgggggtgcccttgtcctttgcaaaagcanatggaaacntgctaacccancaaaatggntttctcgaattnntcctctntgggncccnatgcncccccaggttntgtncnacccctggaattccttgttttccccnatttccttgtggnaaaagccacccncagaaantcgggnttttnanntncaancaactggccctggntccnttttccaaaannccanaaccnggnttn

SEQ ID NO: 38 - DNA, 1172 bp, Homo Sapiens
  misc_feature (1)..(1): n is a, c, g, or t
  misc_feature (929)..(929): n is a, c, g, or t
  misc_feature (949)..(949): n is a, c, g, or t
  misc_feature (964)..(964): n is a, c, g, or t
  misc_feature (973)..(973): n is a, c, g, or t
  misc_feature (975)..(975): n is a, c, g, or t
  misc_feature (978)..(978): n is a, c, g, or t
  misc_feature (981)..(981): n is a, c, g, or t
  misc_feature (983)..(983): n is a, c, g, or t
  misc_feature (985)..(985): n is a, c, g, or t
  misc_feature (996)..(996): n is a, c, g, or t
  misc_feature (1019)..(1019): n is a, c, g, or t
  misc_feature (1055)..(1056): n is a, c, g, or t
  misc_feature (1063)..(1063): n is a, c, g, or t
  misc_feature (1067)..(1067): n is a, c, g, or t
  misc_feature (1069)..(1069): n is a, c, g, or t
  misc_feature (1083)..(1083): n is a, c, g, or t
  misc_feature (1097)..(1097): n is a, c, g, or t
  misc_feature (1106)..(1106): n is a, c, g, or t
  misc_feature (1108)..(1108): n is a, c, g, or t
  misc_feature (1114)..(1114): n is a, c, g, or t
  misc_feature (1121)..(1121): n is a, c, g, or t
  misc_feature (1128)..(1128): n is a, c, g, or t
  misc_feature (1130)..(1130): n is a, c, g, or t
  misc_feature (1138)..(1138): n is a, c, g, or t
  misc_feature (1140)..(1140): n is a, c, g, or t
  misc_feature (1142)..(1142): n is a, c, g, or t
  misc_feature (1147)..(1147): n is a, c, g, or t
  misc_feature (1153)..(1153): n is a, c, g, or t
  misc_feature (1160)..(1160): n is a, c, g, or t
  misc_feature (1163)..(1163): n is a, c, g, or t
nttagagaaattactatgaagaggatcgcatcaccatcaccatcacggatcctatttaggtgacactatagaatcgtcgacccacgcgtccgcaaccctcccgagaagcccaggtccagagccaaacccgtcactgaccccccagcccaggcgcccagccactccccaccgctaccatggccgaagacgcagacatgcgcaatgagctggaggagatgcagcgaagggctgaccagttggctgatgagtcgctggaaagcacccgtcgtatgctgcaactggttgaagagagtaaagatgctggtatcaggactttggttatgttggatgaacaaggagaacaactcgatcgtgtcgaagaaggcatgaaccatatcaaccaagacatgaaggaggctgagaaaaatttaaaagatttagggaaatgctgtggccttttcatatgtccttgtaacaagcttaaatcaagtgatgcttacaaaaaagcctggggcaataatcaggacggagtggtggccagccagcctgctcgtgtagtggacgaacgggagcagatggccatcagtggcggcttcatccgcagggtaacaaatgatgcccgagaaaatgaaatggatgaaaacctagagcaggtgagcggcatcatcgggaacctccgtcacatggccctggatatgggcaatgagatcgatacacagaatcgccagatcgacaggatcatggagaaggctgattccaacaaaaccagaattgatgaggccaaccaacgtgcaacaaagatgctgggaagtggttaagtgtgcccacccgtgttctcctccaaatgctgtcgggcaagatagctccttcatgcttttctcatggtattatctagtaggtctgcacacataacacacatcagtccacccccattgtgaatgttgtcctgngtcatctgtcagcttcccancaatactttgggtcntttggttcncnctnggncncnttctttccaangttgtacatagtggtcatttggnggctctactccttgaggtcttgagtttcatttttcnntttcccncccngnggcatttgctgaanaacaacaatttagnaatgctcangngctgtnaatcttncatcccnanaattgttntngnaaaantgggantttcccnaantttctgccc

SEQ ID NO: 39 - DNA, 1235 bp, Homo Sapiens
  misc_feature (873)..(873): n is a, c, g, or t
  misc_feature (898)..(898): n is a, c, g, or t
  misc_feature (949)..(949): n is a, c, g, or t
  misc_feature (954)..(954): n is a, c, g, or t
  misc_feature (963)..(963): n is a, c, g, or t
  misc_feature (986)..(986): n is a, c, g, or t
  misc_feature (1009)..(1009): n is a, c, g, or t
  misc_feature (1014)..(1014): n is a, c, g, or t
  misc_feature (1022)..(1022): n is a, c, g, or t
  misc_feature (1024)..(1024): n is a, c, g, or t
  misc_feature (1036)..(1036): n is a, c, g, or t
  misc_feature (1039)..(1039): n is a, c, g, or t
  misc_feature (1057)..(1057): n is a, c, g, or t
  misc_feature (1060)..(1060): n is a, c, g, or t
  misc_feature (1067)..(1067): n is a, c, g, or t
  misc_feature (1069)..(1069): n is a, c, g, or t
  misc_feature (1072)..(1072): n is a, c, g, or t
  misc_feature (1090)..(1091): n is a, c, g, or t
  misc_feature (1096)..(1096): n is a, c, g, or t
  misc_feature (1098)..(1098): n is a, c, g, or t
  misc_feature (1106)..(1107): n is a, c, g, or t
  misc_feature (1123)..(1123): n is a, c, g, or t
  misc_feature (1128)..(1128): n is a, c, g, or t
  misc_feature (1132)..(1132): n is a, c, g, or t
  misc_feature (1148)..(1148): n is a, c, g, or t
  misc_feature (1159)..(1160): n is a, c, g, or t
  misc_feature (1163)..(1163): n is a, c, g, or t
  misc_feature (1167)..(1167): n is a, c, g, or t
  misc_feature (1178)..(1179): n is a, c, g, or t
  misc_feature (1184)..(1184): n is a, c, g, or t
  misc_feature (1187)..(1187): n is a, c, g, or t
  misc_feature (1192)..(1192): n is a, c, g, or t
  misc_feature (1200)..(1200): n is a, c, g, or t
  misc_feature (1202)..(1202): n is a, c, g, or t
  misc_feature (1213)..(1213): n is a, c, g, or t
  misc_feature (1215)..(1215): n is a, c, g, or t
  misc_feature (1219)..(1219): n is a, c, g, or t
  misc_feature (1225)..(1225): n is a, c, g, or t
  misc_feature (1227)..(1227): n is a, c, g, or t
attagagaaattactatgagaggatcgcatcaccatcaccatcacggatcctatttaggtgacactatagaatcgtcgacccacgcgtccgcccggacccatcctgtggagcccactcctggcagacgccgcgatgcccggcccttggttgctgctcgctctggctttgaccctgaacctgaccggtgtccccggcggccgtgctcagccagaggcggcccagcaggaggcagtgacggccgcggagcatccgggcctggatgacttcctgcgccaggtggagcgcctcctcttcctccgggaaaacatccagcggctgcaaggggaccagggtgagcactccgcgtcccagatctttcaatctgactggctctccaaacgtcagcatccaggcaaaagagaggaggaggaggaagagggagttgaagaagaggaagaggaagaagggggggctgtgggaccccacaaacggcagcaccctggccgacgagaagatgaggcttcatggtcagtcgatgtaacccagcacaagcggcagcatcctggccggcgctccccctggcttgcatatgctgtcccgaagcggcagcacccaggcagaaggctggcagatcccaaggctcaaaggagctgggaagaagaggaggaggaggaagagagagaggaagacctgatgcctgaaaaacgccagcatccgggcaagagggccctgggaggcccctgtgggccccagggagcctatggtcaagcgggcctcctgctggggctcctggatgacctgagtaggagccagggagctgaggaaaagcggcagcaccctggtcggcgggcagcctgggtcagggagcccctggaggagtgaacccagttttncctgaagtcgagtttgtggtctaangatgtcttgagccctgtgtgccccaccattcatgacctctgtattctctantttanatccctgancaataagcctgaaccccttcctncccagccccatattcaaaacatnccaancccctggncnttgcccttttcnttnaggcatgtggaaaaaatncancctaacnanttnaaacccccttttcctccnnttaancnccataagnnaaggggggcaaattcnaaaancccnttttaacccccccaanaaaaggcttgnntcntttnttaaccttggnnaaaanggnccttntttttttngnaaaaactcccnantggnaaaggnanccccttgg

SEQ ID NO: 40 - DNA, 1261 bp, Homo Sapiens
  misc_feature (840)..(840): n is a, c, g, or t
  misc_feature (918)..(918): n is a, c, g, or t
  misc_feature (941)..(941): n is a, c, g, or t
  misc_feature (979)..(979): n is a, c, g, or t
  misc_feature (997)..(997): n is a, c, g, or t
  misc_feature (1014)..(1014): n is a, c, g, or t
  misc_feature (1044)..(1044): n is a, c, g, or t
  misc_feature (1046)..(1046): n is a, c, g, or t
  misc_feature (1050)..(1050): n is a, c, g, or t
  misc_feature (1059)..(1059): n is a, c, g, or t
  misc_feature (1061)..(1061): n is a, c, g, or t
  misc_feature (1095)..(1095): n is a, c, g, or t
  misc_feature (1099)..(1099): n is a, c, g, or t
  misc_feature (1112)..(1112): n is a, c, g, or t
  misc_feature (1114)..(1114): n is a, c, g, or t
  misc_feature (1118)..(1118): n is a, c, g, or t
  misc_feature (1125)..(1125): n is a, c, g, or t
  misc_feature (1134)..(1134): n is a, c, g, or t
  misc_feature (1138)..(1138): n is a, c, g, or t
  misc_feature (1144)..(1144): n is a, c, g, or t
  misc_feature (1149)..(1149): n is a, c, g, or t
  misc_feature (1160)..(1160): n is a, c, g, or t
  misc_feature (1166)..(1166): n is a, c, g, or t
  misc_feature (1172)..(1172): n is a, c, g, or t
  misc_feature (1179)..(1179): n is a, c, g, or t
  misc_feature (1183)..(1183): n is a, c, g, or t
  misc_feature (1188)..(1188): n is a, c, g, or t
  misc_feature (1196)..(1196): n is a, c, g, or t
  misc_feature (1200)..(1201): n is a, c, g, or t
  misc_feature (1207)..(1207): n is a, c, g, or t
  misc_feature (1211)..(1212): n is a, c, g, or t
  misc_feature (1214)..(1214): n is a, c, g, or t
  misc_feature (1222)..(1222): n is a, c, g, or t
  misc_feature (1226)..(1226): n is a, c, g, or t
  misc_feature (1237)..(1238): n is a, c, g, or t
  misc_feature (1245)..(1245): n is a, c, g, or t
  misc_feature (1249)..(1249): n is a, c, g, or t
  misc_feature (1255)..(1255): n is a, c, g, or t
  misc_feature (1261)..(1261): n is a, c, g, or t
caatagagaaattactatgagaggatcgcatcaccatcaccatcacggatcctatttaggtgacactatagaatcgtcgacccacgcgtccgggcattggggccctggccaagtcatcattctcagggatctcacggagcatgaaggaccatgtgacaaagcccacagccatggggcaaggccgggtggcccacatgattgagtggcagggctgggggaagacaccagctgttcagccacaacacagccatgagtccgtgcgcagggatacggatgcctactccgacctcagcgatggcgagaaggaggcacgttttctagcaggcgtcatggagcagtttgctatctctgaggccacactcatggcctggtcttccatggatggtgaggacatgagtgtgaactccacccaggagccattgggctgcaactacagtgacaactaccaggaactgatggacagtcaggatgccctggctcaagcacccatggatggatggcctcactcttacgtgtcccagggtatgtactgtctggggtcgtcagatgcctgggaagccagcgatcagtccctcattgcctctccggccacaggatcctatcttgggcctgcatttgatgactcacaacccagcttgcatgaaatgggaccttcccaaccagcttcaggatactctgctctggagcctccacctttgctggggggagacactgactgggctccgggggtaggcgcagtggacctggcaaggggccctgctgaggaggagaagaggccattggcacctgaagaggaagaggatgcgggatgccgggacctggagtcactttccccacganaagaccctgagatgtctaccgctctcagccggaaggtgtctgacgtcacatcctcaggtgtgcagtcctttgatgagnaggaaggcgaggccaacaactantttcctccccaatgccctgccttccactcccacctganggccatggctgtgacccnataccctccctcccccnacaataaagctgaaactgggcaaaaaaaantngggnaaacccagnanctttccaattcttctcctggaaatggaaggaccngaanggaatttttcccngncttnaccttcnaaaaacccnaagncctggnaactnaacctgggcanataaanggcccnaactttnttgngcttngaaaaaanaccnnggcttngggnntntgggtttntccnaaaaacccccnntgtgtcncccnaagaangggggn

SEQ ID NO: 41 - DNA, 1147 bp, Homo Sapiens
  misc_feature (1)..(1): n is a, c, g, or t
  misc_feature (860)..(860): n is a, c, g, or t
  misc_feature (867)..(867): n is a, c, g, or t
  misc_feature (912)..(912): n is a, c, g, or t
  misc_feature (960)..(960): n is a, c, g, or t
  misc_feature (992)..(992): n is a, c, g, or t
  misc_feature (1000)..(1000): n is a, c, g, or t
  misc_feature (1014)..(1014): n is a, c, g, or t
  misc_feature (1037)..(1037): n is a, c, g, or t
  misc_feature (1041)..(1042): n is a, c, g, or t
  misc_feature (1054)..(1055): n is a, c, g, or t
  misc_feature (1058)..(1058): n is a, c, g, or t
  misc_feature (1071)..(1071): n is a, c, g, or t
  misc_feature (1084)..(1084): n is a, c, g, or t
  misc_feature (1086)..(1086): n is a, c, g, or t
  misc_feature (1093)..(1093): n is a, c, g, or t
  misc_feature (1107)..(1107): n is a, c, g, or t
  misc_feature (1116)..(1117): n is a, c, g, or t
  misc_feature (1122)..(1122): n is a, c, g, or t
  misc_feature (1125)..(1126): n is a, c, g, or t
  misc_feature (1136)..(1139): n is a, c, g, or t
  misc_feature (1146)..(1146): n is a, c, g, or t
naatagagaaattaactatgagaggatcgcatcaccatcaccatcacggatcctatttaggtgacactatagaatcgtcgacccacgcgtccgccaattttggacccattgggactccagataacagggatagaaggactgcagatcggtggaaaactgataagccagccatgggtgggtttggcattgattatctctcagcaacgtcatcctctgagagcagttggcatcaggccagcactccgagtggcacctggacaggccatggcccttccatggaggattcctctgctgtcctcatggaaagcctaaagtctatctggtccagttccatgatgcatcctggaccttctgctctggagcagctgttaatgcagcagaagcagaaacagcaacggggacaaggcaccatgaaccctccacactgaggccaaagtggcaacctgggaatgaaggctccataaaccatggcatgttgggtttgcaggactggcccacacagtcccctgcaggtggcagccctcttttctgtttctcgctgtcaagagggtgtaagtattccaccagcccgctgagtgtgcacgaaatgttcgcagtgcaacaaaaagaaaaatccatcaggaactctccgtccccccggggccctccggagggagagagagaggaactgctgtttatctcactcagttacttggtatcaccgcctctcaccttctccatcgtgcatgtccccagccacatgggaagtgaaagctgaaaagggaaggcagatgggagaagccaatgggaacttctcagtcctttttttcctctttggggaataaaataggaatccattaatgattgctttgctgactganaatgtanttgaaattattcttaaacatcttttattattattactctcagtantaaatatcacactgaattcttccatacacaggtgtgcttctagtcagngtgtacaaaggaaagcccccgttcactgctcntgtgaaangttggtggtgacangaatggggaaaccaacctcttcncccnnggaaatgttccnnaanggaaaattcaagncctgtcaaaaggntntggaagnccttccctggccanaaaactccnncaggnaannccttccctcnnnngggcccna

SEQ ID NO: 42 - DNA, 1179 bp, Homo Sapiens
  misc_feature (14)..(14): n is a, c, g, or t
  misc_feature (916)..(916): n is a, c, g, or t
  misc_feature (921)..(921): n is a, c, g, or t
  misc_feature (952)..(952): n is a, c, g, or t
  misc_feature (957)..(957): n is a, c, g, or t
  misc_feature (967)..(967): n is a, c, g, or t
  misc_feature (984)..(984): n is a, c, g, or t
  misc_feature (997)..(997): n is a, c, g, or t
  misc_feature (1013)..(1013): n is a, c, g, or t
  misc_feature (1024)..(1024): n is a, c, g, or t
  misc_feature (1037)..(1037): n is a, c, g, or t
  misc_feature (1043)..(1043): n is a, c, g, or t
  misc_feature (1061)..(1061): n is a, c, g, or t
  misc_feature (1078)..(1078): n is a, c, g, or t
  misc_feature (1091)..(1091): n is a, c, g, or t
  misc_feature (1097)..(1097): n is a, c, g, or t
  misc_feature (1101)..(1101): n is a, c, g, or t
  misc_feature (1106)..(1106): n is a, c, g, or t
  misc_feature (1120)..(1120): n is a, c, g, or t
  misc_feature (1125)..(1125): n is a, c, g, or t
  misc_feature (1127)..(1127): n is a, c, g, or t
  misc_feature (1131)..(1131): n is a, c, g, or t
  misc_feature (1136)..(1136): n is a, c, g, or t
  misc_feature (1142)..(1142): n is a, c, g, or t
  misc_feature (1157)..(1157): n is a, c, g, or t
  misc_feature (1160)..(1160): n is a, c, g, or t
  misc_feature (1168)..(1168): n is a, c, g, or t
  misc_feature (1174)..(1174): n is a, c, g, or t
  misc_feature (1177)..(1177): n is a, c, g, or t
atagagaaattacnatgagaggatcgcatcaccatcaccattcacggatcctatttaggtgacactatagaatcgtcgacccacgcgtccgctctcggcacaagcatgtacggcaaaggcaagagtaacagcagcgccgtcccgtccgacagccaggcccgggagaagttagcactctacgtatatgaatatctgctccatgtaggagctcagaaatcagctcaaacatttttatcagagataagatgggaaaaaaacatcacattgggggaaccaccaggattcttacattcttggtggtgtgtattttgggatctctactgtgcagctccagagagacgtgaaacatgtgaacactcaagtgaagcaaaagccttccatgattacagtgctgcagcagctcccagtccagtgctaggaaacattcccccaggagatggcatgccagtaggtcctgtaccaccagggttctttcaggcacttggaggtgtcccaggaagtcagccattactccccagtggaatggatccaactcgacaacaaggacatccaaatatgggtgggccaatgcagagaatgactcctccaagaggaatggtgcccttaggaccacagaactatggaggtgcaatgagacccccactgaatgctttaggtggccctggaatgcctggaatgaacatgggtccaggtggtggtagaccttggccaaacccaacaaatgccaattcaataccatactcctcagcatctcctgggaattatgtaggtcctccaggaggtggagggccaccaggaacacccatcatgcctagtccagcagattcaaccaactctggtgataacatgtatactttaatgaatgcagtacctcctggacctaacagacctaattttccaatgggccctgggtcanatggntcccatgggtggattaggaggaatggagtcncatcncatgaatggnctctttaggctcagaanatatggacagtanttccaaaaattctccnataaaatgaancctgaataatcanccgggncctccaagggatgatggncaaaatgggggggaaantttcttaaattcnttttcnaagngaaanttactcccctaacntgganangagnggggngatccnttaccaagtcccccnagnaaaacccnagggantcncc

SEQ ID NO: 43 - DNA, 1255 bp, Homo Sapiens
  misc_feature (853)..(853): n is a, c, g, or t
  misc_feature (880)..(880): n is a, c, g, or t
  misc_feature (903)..(903): n is a, c, g, or t
  misc_feature (912)..(912): n is a, c, g, or t
  misc_feature (917)..(917): n is a, c, g, or t
  misc_feature (966)..(966): n is a, c, g, or t
  misc_feature (972)..(972): n is a, c, g, or t
  misc_feature (982)..(982): n is a, c, g, or t
  misc_feature (997)..(997): n is a, c, g, or t
  misc_feature (1024)..(1024): n is a, c, g, or t
  misc_feature (1032)..(1032): n is a, c, g, or t
  misc_feature (1055)..(1055): n is a, c, g, or t
  misc_feature (1057)..(1057): n is a, c, g, or t
  misc_feature (1065)..(1065): n is a, c, g, or t
  misc_feature (1077)..(1077): n is a, c, g, or t
  misc_feature (1084)..(1084): n is a, c, g, or t
  misc_feature (1087)..(1087): n is a, c, g, or t
  misc_feature (1096)..(1096): n is a, c, g, or t
  misc_feature (1114)..(1114): n is a, c, g, or t
  misc_feature (1124)..(1124): n is a, c, g, or t
  misc_feature (1140)..(1140): n is a, c, g, or t
  misc_feature (1142)..(1142): n is a, c, g, or t
  misc_feature (1147)..(1148): n is a, c, g, or t
  misc_feature (1159)..(1159): n is a, c, g, or t
  misc_feature (1163)..(1163): n is a, c, g, or t
  misc_feature (1191)..(1191): n is a, c, g, or t
  misc_feature (1198)..(1198): n is a, c, g, or t
  misc_feature (1204)..(1205): n is a, c, g, or t
  misc_feature (1212)..(1212): n is a, c, g, or t
  misc_feature (1222)..(1223): n is a, c, g, or t
  misc_feature (1230)..(1230): n is a, c, g, or t
  misc_feature (1236)..(1236): n is a, c, g, or t
  misc_feature (1238)..(1238): n is a, c, g, or t
  misc_feature (1242)..(1243): n is a, c, g, or t
  misc_feature (1248)..(1249): n is a, c, g, or t
  misc_feature (1255)..(1255): n is a, c, g, or t
tagagaaattactatgagaggatcgcatcaccatcaccatcacggatcctatttaggtgacactatagaatcgtcgacccacgcgtccggccagacacactgtgacggctgcctgaagctagtgagtcgcggcgccgcgcactggtggttgggtcagtgccgcgcgccgatcggtcgttaccgcgaggcgctggtggccttcaggctggacggcgcgggtcagccctggttcgccggcttctgggtctttgaacagccgcgatgtcgatcttcacccccaccaaccagatccgcctaaccaatgtggccgtggtacggatgaagcgtgccgggaagcgcttcgaaatcgcctgctacaaaaacaaggtcgtcggctggcggagcggcgtggaaaaagacctcgatgaagttctgcagacccactcagtgtttgtaaatgtttctaaaggtcaggttgccaaaaaggaagatctcatcagtgcgtttggaacagatgaccaaactgaaatctgtaagcagattttgactaaaggagaagttcaagtatcagataaagaaagacacacacaactggagcagatgtttagggacattgcaactattgtggcagacaaatgtgtgaatcctgaaacaaagagaccatacaccgtgatccttattgagagagccatgaaggacatccactattcggtgaaaaccaacaagagtacaaaacagcaggctttggaagtgataaagcagttaaaagagaaaatgaagatagaacgtgctcacatgaggcttcggttcatccttccagtcaatgaaggcaagaagctgaaagaaaagctcaagccactgatcaaggtcatanaaagtgaagattatggccaacagttanaaatcgtatgtctgattgacccngggctgctnccaanaattgatgagctataaaaaaggaaactaaaggcaaaggttctttggaantactcnatctgaaaanatgtaaaaaaagganatgaaaaatttgaatgacccccatcantctcttcncctctaaaaaactaaaatgtttncnttttccanggcactgtttcntgtctgnggnctgccaaanacttgcttaaactatttnaaattttctntcttttggttaacagngnaaacnncaaggctttcntacnaaaataaaaaaagggggaaagaattggntttaatnaaaaannggggtcnaaacctaaanncaaattnaaaccncnaaanncaaannccaaan

SEQ ID NO: 44 - DNA, 1155 bp, Homo Sapiens
  misc_feature (3)..(3): n is a, c, g, or t
  misc_feature (863)..(863): n is a, c, g, or t
  misc_feature (867)..(867): n is a, c, g, or t
  misc_feature (891)..(891): n is a, c, g, or t
  misc_feature (940)..(940): n is a, c, g, or t
  misc_feature (948)..(948): n is a, c, g, or t
  misc_feature (951)..(951): n is a, c, g, or t
  misc_feature (986)..(986): n is a, c, g, or t
  misc_feature (992)..(992): n is a, c, g, or t
  misc_feature (1000)..(1000): n is a, c, g, or t
  misc_feature (1014)..(1014): n is a, c, g, or t
  misc_feature (1023)..(1023): n is a, c, g, or t
  misc_feature (1028)..(1029): n is a, c, g, or t
  misc_feature (1037)..(1037): n is a, c, g, or t
  misc_feature (1040)..(1040): n is a, c, g, or t
  misc_feature (1042)..(1042): n is a, c, g, or t
  misc_feature (1054)..(1054): n is a, c, g, or t
  misc_feature (1059)..(1059): n is a, c, g, or t
  misc_feature (1062)..(1062): n is a, c, g, or t
  misc_feature (1068)..(1068): n is a, c, g, or t
  misc_feature (1077)..(1077): n is a, c, g, or t
  misc_feature (1085)..(1086): n is a, c, g, or t
  misc_feature (1088)..(1088): n is a, c, g, or t
  misc_feature (1094)..(1094): n is a, c, g, or t
  misc_feature (1098)..(1098): n is a, c, g, or t
  misc_feature (1107)..(1110): n is a, c, g, or t
  misc_feature (1114)..(1114): n is a, c, g, or t
  misc_feature (1124)..(1124): n is a, c, g, or t
  misc_feature (1136)..(1137): n is a, c, g, or t
  misc_feature (1150)..(1150): n is a, c, g, or t
  misc_feature (1155)..(1155): n is a, c, g, or t
atngagaaattactatgagaggatcgcatcaccatcaccatcacggatcctatttaggtgacactatagaatcgtcgacccacgcgtccgtgccctgcgaggagaagaaaacctacgactgcagcgagtgtggcaaggcctttagccgaagctcgtccctgataaagcaccaaaggatccacacgggagaaaagccgtttgagtgtgacacctgtgggaagcacttcatcgagcgctcgtccctcaccatccaccagcgggtgcacacgggcgagaagccctatgcctgcggggactgcggcaaggccttcagccagcgcatgaacctcactgtgcaccagcgcacgcacacgggcgagaagccgtatgtgtgcgacgtgtgtggcaaggccttccggaagacttcctctctcacccagcacgagcggatccacacgggggagaagccctacgcgtgcggggactgcggcaaggccttcagccagaacatgcacctcatcgtgcaccagcgcacgcacaccggggagaagccgtacgtgtgccccgagtgcgggcgagccttcagccagaacatgcacctgaccgagcaccagcgcacgcacaccggggagaagccgtacgcctgcaaggagtgcggcaaggccttcaacaagagctcctcgctcaccctgcaccagaggaaccacaccggcgagaagccctacgtgtgcggcgagtgcggcaaggccttcagccagagctcctacctcatccagcaccagcgcttccacatcggcgtgaagccgttcgagtgcagcgagtgcggcaaggccttcagcaagaactcctcgctcacgcagcaccagcgcatccacaccggcganaaanccctacgagtgctacatctgcaanaagcacttcacggggcgctcgtccctcatcgtgcaccaaatcgtgcacnccgggganaanccctacgtgtgcggcgagtgcggcaaggccttcanccaaancgcctacntcatcgagcaccancggatcccnccggnnaaaaaccntananggtgcggccagngcggnaantctttnttcaaaaantcttcctnncntgtgcnccancggattccnnnngggngaaaaacccntaccgatgcggnnaggggggaaaacntttan

SEQ ID NO: 45 - DNA, 1148 bp, Homo Sapiens
  misc_feature (836)..(836): n is a, c, g, or t
  misc_feature (875)..(875): n is a, c, g, or t
  misc_feature (878)..(878): n is a, c, g, or t
  misc_feature (939)..(939): n is a, c, g, or t
  misc_feature (943)..(943): n is a, c, g, or t
  misc_feature (952)..(952): n is a, c, g, or t
  misc_feature (959)..(959): n is a, c, g, or t
  misc_feature (964)..(964): n is a, c, g, or t
  misc_feature (969)..(969): n is a, c, g, or t
  misc_feature (979)..(979): n is a, c, g, or t
  misc_feature (985)..(985): n is a, c, g, or t
  misc_feature (989)..(989): n is a, c, g, or t
  misc_feature (1007)..(1007): n is a, c, g, or t
  misc_feature (1009)..(1009): n is a, c, g, or t
  misc_feature (1017)..(1017): n is a, c, g, or t
  misc_feature (1019)..(1019): n is a, c, g, or t
  misc_feature (1026)..(1026): n is a, c, g, or t
  misc_feature (1038)..(1038): n is a, c, g, or t
  misc_feature (1052)..(1053): n is a, c, g, or t
  misc_feature (1067)..(1067): n is a, c, g, or t
  misc_feature (1069)..(1069): n is a, c, g, or t
  misc_feature (1074)..(1075): n is a, c, g, or t
  misc_feature (1092)..(1092): n is a, c, g, or t
  misc_feature (1095)..(1096): n is a, c, g, or t
  misc_feature (1098)..(1098): n is a, c, g, or t
  misc_feature (1108)..(1109): n is a, c, g, or t
  misc_feature (1111)..(1111): n is a, c, g, or t
  misc_feature (1113)..(1113): n is a, c, g, or t
  misc_feature (1115)..(1115): n is a, c, g, or t
  misc_feature (1119)..(1119): n is a, c, g, or t
  misc_feature (1121)..(1121): n is a, c, g, or t
  misc_feature (1125)..(1125): n is a, c, g, or t
  misc_feature (1133)..(1133): n is a, c, g, or t
  misc_feature (1136)..(1136): n is a, c, g, or t
gaatagagagattactatgagaggatcgcatcaccatcaccatcacggatcctatttaggtgacactatagaatcgtcgacccacgcgtccgcgctgtgcgagtgtcggagatggcggggcttcagcacctcggccgtcctgggccgccggacacccccgctggggccgatgcccaacagtgacatcgacttgagcaacctggagcggctggagaagtaccggagcttcgaccgctaccggcgccgagcagagcaggaggcgcaggccccgcactggtggcggacctaccgagagtatttcggggagaagacagatcccaaagagaagattgatattgggctgcctccacccaaagtctcccggacccaacagctactggaacggaaacaggccatccaggagcttcgggccaatgtggaagaggagcgggctgcccgcctccgcacagccagtgtcccgctggatgccgtgcgggccgagtgggagaggacctgtggcccctaccacaagcagcgtctggctgagtattacggcctctaccgagacctgttccacggtgccacctttgtgccccgagtccccctgcacgtggcctacgctgtgggtgaggatgacctgatgcctgtgtactgtggcaatgaggtgactccaaccgaggctgcccaagcgccagaggtgacctatgaggcagaagagggctccttgtggacgttgctactcactagcttggatgggcacctgctggagccagatgctgagtacctccactggctgctgggccctgggatccacgtgtctacttgaagacagctacaggagacaaagtttgcagtangcctcgaaccaacatcccgggtaaccgggtgggctgaanganaggtgacgtgtccctacctccccccccttcctgcccgaagctccggcatccaccgtcttgncttnctgctcttnaagcagnacaanccgantgactttttnaagaancacnccccctcaccctgctatnanctgggccnancggaacnttcccacttttnatttctacaaaaanncccaaaaaaccatnanttccnnccggttttttctttttncanngncccctgggannantncnttcncntaantttttcanaanttttttgaaatt

SEQ ID NO: 46 - DNA, 1303 bp, Homo Sapiens
  misc_feature (921)..(921): n is a, c, g, or t
  misc_feature (987)..(987): n is a, c, g, or t
  misc_feature (1001)..(1001): n is a, c, g, or t
  misc_feature (1027)..(1027): n is a, c, g, or t
  misc_feature (1045)..(1045): n is a, c, g, or t
  misc_feature (1047)..(1047): n is a, c, g, or t
  misc_feature (1063)..(1063): n is a, c, g, or t
  misc_feature (1070)..(1070): n is a, c, g, or t
  misc_feature (1088)..(1089): n is a, c, g, or t
  misc_feature (1091)..(1111): n is a, c, g, or t
  misc_feature (1123)..(1123): n is a, c, g, or t
  misc_feature (1135)..(1136): n is a, c, g, or t
  misc_feature (1138)..(1138): n is a, c, g, or t
  misc_feature (1161)..(1161): n is a, c, g, or t
  misc_feature (1169)..(1169): n is a, c, g, or t
  misc_feature (1181)..(1181): n is a, c, g, or t
  misc_feature (1196)..(1196): n is a, c, g, or t
  misc_feature (1200)..(1200): n is a, c, g, or t
  misc_feature (1204)..(1204): n is a, c, g, or t
  misc_feature (1212)..(1212): n is a, c, g, or t
  misc_feature (1216)..(1216): n is a, c, g, or t
  misc_feature (1225)..(1225): n is a, c, g, or t
  misc_feature (1229)..(1229): n is a, c, g, or t
  misc_feature (1250)..(1250): n is a, c, g, or t
  misc_feature (1252)..(1252): n is a, c, g, or t
  misc_feature (1258)..(1258): n is a, c, g, or t
  misc_feature (1264)..(1264): n is a, c, g, or t
  misc_feature (1271)..(1271): n is a, c, g, or t
  misc_feature (1283)..(1283): n is a, c, g, or t
  misc_feature (1285)..(1286): n is a, c, g, or t
  misc_feature (1292)..(1292): n is a, c, g, or t
gagaaattactatgagaggatcgcatcaccatcaccatcacggatcctatttaggtgacactatagaatcgtcgacccacgcgtccggcggcgccccggaagaggcgggcggcatggccgctggcgtggactgcggggacggggttggcgcccggcagcacgtgttcctggtttcagaatatttaaaagatgcttcaaagaagatgaaaaatgggctaatgtttgtaaaactggttaacccctgttcaggagaaggagccatttacttgttcaatatgtgtctacagcagctgtttgaagtaaaagttttcaaggaaaaacaccattcttggtttataaatcaatcagttcaatcaggaggtcttctccattttgccacacctgtggatcctctatttctgcttctccactacctcataaaggctgataaggaggggaagtttcagccccttgatcaagttgtggtggataacgtgtttccaaattgcatcttgttgctgaaacttcctggacttgagaagttacttcatcatgtgacagaggaaaaaggtaatccagaaatagacaacaagaaatattacaagtacagcaaagagaagacattaaagtggctggaaaaaaaggttaatcaaactgtggcagcattaaaaaccaataatgtgaatgtcagttcccgggtacagtcaactgcatttttctctggtgaccaagcttccactgacaaggaagaggattatattcgttatgcccatggtctgatatctgactacatccctaaagaattaagtgatgacttatctaaatacttaaagcttccagaaccttcagcctcattgccaaatcctccatcaaagaaaataaagttatcagatgagcctgtagaagcaaaaagaagattacactaagtttaatactaaaganttgaagactgaaaagaaaaatagcaaaatgactgcagctcaaaaggctttggctaaagttgacaanagtggaatgaaaantattgatacctttttggggtaaaaanaaaaaaaaaattggaaangnttgaaactttgaaaanaaaatcnaccaaaattaaaaaaaannannnnnnnnnnnnnnnnnnnnnggggggcccccncccaaaaggganncnaataaacttaaataactgaactngaacccgntgaaaaaacccnaaagacccccaaacncccncggnaatttttnaaancccgggtgncccnggggttttttttggggaaaancnccctancttggngaatttncgggcctaggancnnaaaggnaaaaaacccgg

SEQ ID NO: 47 - DNA, 612 bp, Homo Sapiens
  misc_feature (37)..(37): n is a, c, g, or t
  misc_feature (65)..(65): n is a, c, g, or t
  misc_feature (82)..(82): n is a, c, g, or t
  misc_feature (87)..(88): n is a, c, g, or t
  misc_feature (106)..(106): n is a, c, g, or t
  misc_feature (193)..(193): n is a, c, g, or t
  misc_feature (214)..(214): n is a, c, g, or t
  misc_feature (236)..(236): n is a, c, g, or t
  misc_feature (290)..(290): n is a, c, g, or t
  misc_feature (305)..(305): n is a, c, g, or t
  misc_feature (310)..(310): n is a, c, g, or t
  misc_feature (320)..(320): n is a, c, g, or t
  misc_feature (323)..(323): n is a, c, g, or t
  misc_feature (332)..(332): n is a, c, g, or t
  misc_feature (378)..(380): n is a, c, g, or t
  misc_feature (387)..(387): n is a, c, g, or t
  misc_feature (424)..(424): n is a, c, g, or t
  misc_feature (437)..(437): n is a, c, g, or t
  misc_feature (442)..(442): n is a, c, g, or t
  misc_feature (483)..(483): n is a, c, g, or t
  misc_feature (485)..(486): n is a, c, g, or t
  misc_feature (504)..(504): n is a, c, g, or t
  misc_feature (508)..(508): n is a, c, g, or t
  misc_feature (518)..(518): n is a, c, g, or t
  misc_feature (521)..(522): n is a, c, g, or t
  misc_feature (531)..(531): n is a, c, g, or t
  misc_feature (538)..(538): n is a, c, g, or t
  misc_feature (549)..(549): n is a, c, g, or t
  misc_feature (552)..(553): n is a, c, g, or t
  misc_feature (558)..(558): n is a, c, g, or t
  misc_feature (560)..(560): n is a, c, g, or t
  misc_feature (568)..(568): n is a, c, g, or t
  misc_feature (573)..(573): n is a, c, g, or t
  misc_feature (576)..(576): n is a, c, g, or t
  misc_feature (587)..(589): n is a, c, g, or t
  misc_feature (594)..(594): n is a, c, g, or t
  misc_feature (603)..(603): n is a, c, g, or t
  misc_feature (610)..(610): n is a, c, g, or t
aagagaattaactatgagaggatcgcatcacctctcnccactcacgggatcctatttatgttganactactagtaatcgtcnacccnngcggtccgcccacgcgtncgcccacgcgtccgtttgtgaggaaggtggtgtgctacgctgaacatgaacctcatggatgcctccgtgcctcccctggcccttggnctgctggaaagtgtgaccttnagcagcccagccctgggccagntggtcaagagcgaggtgcccctggataggctgctggtgcacctacaggtgtaancctctggggctgggntccanatgcaaggancanggctggagnctgaatgttccactgagccctcttcttgccataggatgaaccagcnnntgcaaancaaggccatggccctgctgacagccttgctgcggggngccagccctgtgnaacgnaatcacatgcttgactatctttggcagaaggaaccttcgcnanntcatctataagaacatcntccncagtgcaacnccnntgggcgacnagatggntcatcacctgnacnnactgnangctctcangctgnggntgctggagccnnncatgnggacgcccntggaccncc

SEQ ID NO: 48 - DNA, 1041 bp, Homo Sapiens
  misc_feature (814)..(814): n is a, c, g, or t
  misc_feature (867)..(867): n is a, c, g, or t
  misc_feature (916)..(916): n is a, c, g, or t
  misc_feature (931)..(931): n is a, c, g, or t
  misc_feature (948)..(948): n is a, c, g, or t
  misc_feature (961)..(961): n is a, c, g, or t
  misc_feature (963)..(963): n is a, c, g, or t
  misc_feature (973)..(973): n is a, c, g, or t
  misc_feature (1003)..(1003): n is a, c, g, or t
  misc_feature (1019)..(1031): n is a, c, g, or t
  misc_feature (1033)..(1037): n is a, c, g, or t
  misc_feature (1039)..(1041): n is a, c, g, or t
agaaattactatgagaggatcgcatcaccatcaccatcacggatcctatttaggtgacactatagaatcgtcgacccacgcgtccgcccaggcatggcgccgctgcgcttctccgccaatctgtcctggctattccccgagctccccggcctccccgcgcgggtgcgggccgcgggcagctcgggcttcgaggccgtcgaggtggcctggccgtacgcggagacgcctgaggcgctggcgcgcgccgcgcgagaagcggggctgcggcttgtactgatcaacacgcccccgggagaccaagagaagggggaaatggggctgggggccgtccccgggagacaggcggccttccgagagggactggagcaggccgtgcggtatgccaaagccctgggctgtcccaggatccacctgatggctggccgagtaccccagggagctgatcgaatagcagtcaaggctgagatggaggccgtttttctggagaacctgaggcatgcagctggggttttggctcaggaggacctcgtgggactgctggagcccatcaacacccgcatcactgacccccagtacttcctggacacgccccagcaggcggcagccatcttacagaaggtaggaagacccaacctccaattacaaatggacatattccactggcagatcatggatgggaacctgacaggaaacatccgggagttcctgcccattgttgggcatgtgcaggtggcacaggtcccaggccgaggggagcccagcagccccggagagctgaatttcccctatctgtttcaactgctggaagatgaangctacaaaggcttcgtgggctgtgagtatcagcctcgaggagacacagtaaangggctttgagttggctacgttcatactgggaataggcggggccacccanaggctggccagtganggcccgcaaaaccaccnacgtgccttccananagcgagtganatcccatctcctcctctgcattaaaaaaanacttgctgaaaaaaannnnnnnnnnnnnannnnnannn

SEQ ID NO: 49 - DNA, 1218 bp, Homo Sapiens
  misc_feature (4)..(5): n is a, c, g, or t
  misc_feature (8)..(8): n is a, c, g, or t
  misc_feature (16)..(16): n is a, c, g, or t
  misc_feature (18)..(18): n is a, c, g, or t
  misc_feature (20)..(20): n is a, c, g, or t
  misc_feature (38)..(38): n is a, c, g, or t
  misc_feature (48)..(48): n is a, c, g, or t
  misc_feature (63)..(63): n is a, c, g, or t
  misc_feature (107)..(107): n is a, c, g, or t
  misc_feature (910)..(910): n is a, c, g, or t
  misc_feature (960)..(960): n is a, c, g, or t
  misc_feature (964)..(964): n is a, c, g, or t
  misc_feature (976)..(976): n is a, c, g, or t
  misc_feature (1001)..(1001): n is a, c, g, or t
  misc_feature (1006)..(1007): n is a, c, g, or t
  misc_feature (1009)..(1010): n is a, c, g, or t
  misc_feature (1019)..(1019): n is a, c, g, or t
  misc_feature (1041)..(1041): n is a, c, g, or t
  misc_feature (1047)..(1047): n is a, c, g, or t
  misc_feature (1049)..(1049): n is a, c, g, or t
  misc_feature (1054)..(1054): n is a, c, g, or t
  misc_feature (1064)..(1064): n is a, c, g, or t
  misc_feature (1068)..(1068): n is a, c, g, or t
  misc_feature (1074)..(1074): n is a, c, g, or t
  misc_feature (1087)..(1088): n is a, c, g, or t
  misc_feature (1094)..(1094): n is a, c, g, or t
  misc_feature (1101)..(1101): n is a, c, g, or t
  misc_feature (1116)..(1116): n is a, c, g, or t
  misc_feature (1120)..(1120): n is a, c, g, or t
  misc_feature (1128)..(1128): n is a, c, g, or t
  misc_feature (1131)..(1131): n is a, c, g, or t
  misc_feature (1133)..(1133): n is a, c, g, or t
  misc_feature (1138)..(1139): n is a, c, g, or t
  misc_feature (1154)..(1154): n is a, c, g, or t
  misc_feature (1180)..(1180): n is a, c, g, or t
  misc_feature (1182)..(1182): n is a, c, g, or t
  misc_feature (1191)..(1192): n is a, c, g, or t
  misc_feature (1195)..(1195): n is a, c, g, or t
  misc_feature (1208)..(1208): n is a, c, g, or t
  misc_feature (1213)..(1213): n is a, c, g, or t
catnnagnaattactntnanaggatcgcatcaccatcnccatcacggntcctatttaggtganactatagaatcgtcgacccacgcgtccgcccacgcgtccgcgcngcgactgagcttgggtccgactggagctcaggctcgcgacccagactggtgggccaggcctccaagccggccttacacccaatccaaggaggacagaccggacacagagggacggagcgagcaaggagacatggcttcatcattcctgcccgcgggggccatcaccggcgacagcggtggagagctgagctcaggggacgactccggggaggtggagttcccccatagccctgagatcgaggagaccagttgcctggccgagctgtttgagaaggctgccgcgcacctgcaaggcctgattcaggtggccagcagggagcagctcttgtacctgtatgccaggtacaaacaggtcaaagttggaaattgtaatactcctaaaccaagcttctttgattttgaaggaaagcaaaaatgggaagcttggaaagcacttggtgattcaagccccagccaagcaatgcaggaatatatcgcagtagttaaaaaactagatccaggttggaatcctcagataccagagaagaaaggaaaagaagcaaatacaggttttggtgggccagttattagttctctatatcatgaagaaaccatcagggaagaagacaaaaatatatttgattactgcagggaaaacaacattgaccatataaccaaagccatcaaatcgaaaaatgtggatgtgaatgtgaaagatgaagagggtagggctctacttcactgggcctgtgatcgaggacataaggaactagtcacagtgttgctgcaacatagagctgaaattaactgtcaggacaatgaangccaaacagctctacattatgcctctgcctgtgaattttctggatattgnaaanctgctgctccantctggtgctgaccccactctccaanaccannanngcttgcctnccaaaagaaggtgacaggcttncaaaananttttntttggtgctncacngccccncaattggcaaggnnttaatnaaaaaanttggaaacttgccancttntaaaaccnaangncttcnnttttaaaaaaaactnaaaaaaaaaaacttttttttcccccntnctttgaaannatngccaaaaaaaccnttttnggaac

SEQ ID NO: 50 - DNA, 1211 bp, Homo Sapiens
  misc_feature (858)..(858): n is a, c, g, or t
  misc_feature (904)..(904): n is a, c, g, or t
  misc_feature (928)..(928): n is a, c, g, or t
  misc_feature (938)..(938): n is a, c, g, or t
  misc_feature (949)..(949): n is a, c, g, or t
  misc_feature (967)..(967): n is a, c, g, or t
  misc_feature (978)..(978): n is a, c, g, or t
  misc_feature (987)..(987): n is a, c, g, or t
  misc_feature (1002)..(1002): n is a, c, g, or t
  misc_feature (1018)..(1018): n is a, c, g, or t
  misc_feature (1027)..(1027): n is a, c, g, or t
  misc_feature (1049)..(1049): n is a, c, g, or t
  misc_feature (1058)..(1058): n is a, c, g, or t
  misc_feature (1078)..(1078): n is a, c, g, or t
  misc_feature (1091)..(1093): n is a, c, g, or t
  misc_feature (1102)..(1102): n is a, c, g, or t
  misc_feature (1134)..(1134): n is a, c, g, or t
  misc_feature (1146)..(1146): n is a, c, g, or t
  misc_feature (1156)..(1156): n is a, c, g, or t
  misc_feature (1161)..(1161): n is a, c, g, or t
  misc_feature (1166)..(1168): n is a, c, g, or t
  misc_feature (1174)..(1174): n is a, c, g, or t
  misc_feature (1177)..(1177): n is a, c, g, or t
  misc_feature (1179)..(1179): n is a, c, g, or t
  misc_feature (1185)..(1185): n is a, c, g, or t
  misc_feature (1188)..(1188): n is a, c, g, or t
  misc_feature (1194)..(1194): n is a, c, g, or t
  misc_feature (1207)..(1207): n is a, c, g, or t
caatagagaaattactatgagaggatcgcatcaccatcaccatcacggatcctatttaggtgacactatagaatcgtcgacccacgcgtccgagagaattggagtattgtctcctggagaaccgggtggtcgggatcgtggaccagggaaggggcttttgctggtcggggagcgccaactgggggttcatgggtggaaaaactttcggatcaagacggggtataaggctagaggcgtgtgcagaggaggggaccgacggaacggggacccaactgggtctacgtgggggcgggggcgcttgtggacgtccaccaaatagcttggtatgcagatgagatgtcaagcagcaggtagatgagttcagtgttctttggctcacgggcaaagttctgagccgagccaagttacgctcccagttcctaggcaccgctcggtgatcgggcctggggagctgcgacccgaggggcggatccaggcatcagaacacaccatgatggctgtgacctaagaccctcaggaagccccggggtcatggcccagaagcaccccggagaaagagggttgtatggagcccaccacagtggtggtgcctccctcaggactttaggaccctccgtggaccctgaaataccttcattctcaggactcagggactcagcagggactgctcctaatggtacccgctgcctcacagagcactctggtcctaagcacacacagcacccaaacccagcccattggttggacccaagccatggccccccagggggtccaggaccacctagagatgcagaggaccctgatcagagtgagacgtcttcagaaaaaagatcaggagtggaccaggaactctcaaangaaaacgagactgggaaccagaaggatgggaactctttttctttcnattccatctgcttgcaactgccangggaaccacntggaattccanaagggcccttactctganggaagaaatgnttcttctancaacttttgcccccncttgttacctctccanctttggggnaaaatgaatttggaaaaagaantttatgatnaaaaaactctcaatttcccngtgattttcccgnnngtcccccgnaaaaaaacccccatccgaaaaaagcggccccnctttccacaaanaaaaaacccngaagngtgannnaagaanccnantccctngcnaaatcngttggtccgaaanaatt

SEQ ID NO: 51 - DNA, 1385 bp, Homo Sapiens
  misc_feature (897)..(897): n is a, c, g, or t
  misc_feature (940)..(940): n is a, c, g, or t
  misc_feature (951)..(951): n is a, c, g, or t
  misc_feature (962)..(962): n is a, c, g, or t
  misc_feature (1001)..(1001): n is a, c, g, or t
  misc_feature (1011)..(1011): n is a, c, g, or t
  misc_feature (1034)..(1034): n is a, c, g, or t
  misc_feature (1047)..(1047): n is a, c, g, or t
  misc_feature (1050)..(1050): n is a, c, g, or t
  misc_feature (1056)..(1056): n is a, c, g, or t
  misc_feature (1072)..(1072): n is a, c, g, or t
  misc_feature (1080)..(1080): n is a, c, g, or t
  misc_feature (1082)..(1082): n is a, c, g, or t
  misc_feature (1097)..(1097): n is a, c, g, or t
  misc_feature (1099)..(1099): n is a, c, g, or t
  misc_feature (1105)..(1106): n is a, c, g, or t
  misc_feature (1109)..(1109): n is a, c, g, or t
  misc_feature (1112)..(1113): n is a, c, g, or t
  misc_feature (1138)..(1138): n is a, c, g, or t
  misc_feature (1147)..(1147): n is a, c, g, or t
  misc_feature (1149)..(1149): n is a, c, g, or t
  misc_feature (1157)..(1157): n is a, c, g, or t
  misc_feature (1165)..(1165): n is a, c, g, or t
  misc_feature (1190)..(1190): n is a, c, g, or t
  misc_feature (1194)..(1194): n is a, c, g, or t
  misc_feature (1203)..(1203): n is a, c, g, or t
  misc_feature (1216)..(1216): n is a, c, g, or t
  misc_feature (1231)..(1231): n is a, c, g, or t
  misc_feature (1273)..(1273): n is a, c, g, or t
  misc_feature (1276)..(1276): n is a, c, g, or t
  misc_feature (1278)..(1278): n is a, c, g, or t
  misc_feature (1280)..(1280): n is a, c, g, or t
  misc_feature (1283)..(1283): n is a, c, g, or t
  misc_feature (1285)..(1285): n is a, c, g, or t
  misc_feature (1301)..(1302): n is a, c, g, or t
  misc_feature (1313)..(1313): n is a, c, g, or t
  misc_feature (1324)..(1324): n is a, c, g, or t
  misc_feature (1327)..(1327): n is a, c, g, or t
  misc_feature (1330)..(1330): n is a, c, g, or t
  misc_feature (1343)..(1345): n is a, c, g, or t
  misc_feature (1351)..(1351): n is a, c, g, or t
  misc_feature (1361)..(1361): n is a, c, g, or t
  misc_feature (1367)..(1367): n is a, c, g, or t
  misc_feature (1369)..(1369): n is a, c, g, or t
  misc_feature (1376)..(1376): n is a, c, g, or t
agagaaattactatgagaggatcgcatcaccatcaccatcacggatcctatttaggtgacactatagaatcgtcgacccacgcgtccgccatcgtgtgcacacaggggagaaaccctacctctgtcctgaatgcggcaagggttttgctgacagctcagcccgagtcaagcacctccgcacccaccgtggtgaacgggcccggccaccaccaccatccactctgctgcggccacataacccacctggcccagtacccatggcccctcgaccccgagttcgggcccagccttctggacccagccagccccacgtgtgtggcttctgtgggaaggagttcccccggagctcagatctggtcaaacacaggcgtacacacacgggggagaagccatacaagtgtgcagagtgtggcaagggttttggtgacagttctgcccgcatcaagcaccagcgtgggcacctggtcctgacgccctttgggataggggatggtagggcaaggcccctcaagcaggaggcagcaacaggactggaatgacgcggtccagggagggcggaggcccaggagaccaaagggaggggctctgccgcttagcagagaagaaagggcctgggaggtggtgggagggagaaggaagggaagaaaggggaggaagaatagatagaaatagggattggagacagtaaccttgaagctcaggaaactgtcctggctgggctgagtcaggaccttgccaggacgggctgtacccctggcttctagaagactgcctagcacacagtaggcattcaatacttgttgaataaataaactggctttcacctaaggactcaaccctaaattcctgctgcctcatctgttaagaactgacactttccccttgctgggcaggtantacacacctgtaatcccagcagtttgggaggctgaagtggganaatcacttgancccaaaagttnaaggctgcaattgagctgattgcaccactgatgcctccnaaccttgctntgggaaaccaatgcctgaaacangggtttgtttacnttntgaacntgcaaaaatgggcttntggaattnangtaacaggatgaagncngggttnnttnttnntcggaaggggcaaaaactggtgttnggaaggggnancccccctntggagggnacttttgaaaaaacccaaaattttnggcntggagggancaacccccttganggaaaactgggaaanaaacaaaaaaaaaggttttttgtttccacctggatccaaccnaantntnggnanaaaaaaaccctttttnnaaaaggagatnttaagcgggancanttnttttttttaaaannntttttnagttgagggnttaacncnaaaaagnaaggttccc

SEQ ID NO: 52 - DNA, 1179 bp, Homo Sapiens
  misc_feature (962)..(962): n is a, c, g, or t
  misc_feature (973)..(973): n is a, c, g, or t
  misc_feature (976)..(976): n is a, c, g, or t
  misc_feature (998)..(998): n is a, c, g, or t
  misc_feature (1006)..(1006): n is a, c, g, or t
  misc_feature (1009)..(1009): n is a, c, g, or t
  misc_feature (1031)..(1031): n is a, c, g, or t
  misc_feature (1039)..(1040): n is a, c, g, or t
  misc_feature (1044)..(1044): n is a, c, g, or t
  misc_feature (1069)..(1069): n is a, c, g, or t
  misc_feature (1071)..(1071): n is a, c, g, or t
  misc_feature (1076)..(1078): n is a, c, g, or t
  misc_feature (1092)..(1092): n is a, c, g, or t
  misc_feature (1103)..(1103): n is a, c, g, or t
  misc_feature (1108)..(1108): n is a, c, g, or t
  misc_feature (1111)..(1111): n is a, c, g, or t
  misc_feature (1119)..(1119): n is a, c, g, or t
  misc_feature (1130)..(1130): n is a, c, g, or t
  misc_feature (1158)..(1159): n is a, c, g, or t
  misc_feature (1175)..(1175): n is a, c, g, or t
  misc_feature (1178)..(1178): n is a, c, g, or t
tagagaaattactatgagaggatcgcatcaccatcaccatcacggatcctatttaggtgacactatagaatcgtcgacccacgcgtccgcccacgcgtccggaaaaatgacaaagaggcagcaggagagggcccagccctgtatgaggaccccccagatcagaaaacctcacccagtggcaaacctgccacactcaagatctgctcttggaatgtggatgggcttcgagcctggattaagaagaaaggattagattgggtaaaggaagaagccccagatatactgtgccttcaagagaccaaatgttcagagaacaaactaccagctgaacttcaggagctgcctggactctctcatcaatactggtcagctccttcggacaaggaagggtacagtggcgtgggcctgctttcccgccagtgcccactcaaagtttcttacggcataggcgaggaggagcatgatcaggaaggccgggtgattgtggctgaatttgactcgtttgtgctggtaacagcatatgtacctaatgcaggccgaggtctggtacgactggagtaccggcagcgctgggatgaagcctttcgcaagttcctgaagggcctggcttcccgaaagccccttgtgctgtgtggagacctcaatgtggcacatgaagaaattgaccttcgcaaccccaaggggaacaaaaagaatgctggcttcacgccacaagagcgccaaggcttcggggaattactgcaggctgtgccactggctgacagctttaggcacctctaccccaacacaccctatgcctacaccttttggacttatatgatgaatgctcgatccaagaatgttggttggcgccttgattactttttgttgtcccactctctgttacctgcattgtgtgacaagcaagatccgtttccaagggccctcggcagtgatccctgtcctatcacccctatacctancactgtgaacnccnccccctaaatcactttgaaccntgggaaanaanccccctcaactaccattccttnctttaaanncctnttcaaaaaaaacctgcattctattncncaggnnnaaaactaggaatcntcccacccagncttcntgngaaaaaanttttttttaancccaaaaatttttttttgagggtttttnntttttttaaaaaattntanc

SEQ ID NO: 53 - DNA, 1220 bp, Homo Sapiens
  misc_feature (983)..(983): n is a, c, g, or t
  misc_feature (985)..(985): n is a, c, g, or t
  misc_feature (1004)..(1004): n is a, c, g, or t
  misc_feature (1015)..(1015): n is a, c, g, or t
  misc_feature (1024)..(1024): n is a, c, g, or t
  misc_feature (1049)..(1049): n is a, c, g, or t
  misc_feature (1055)..(1055): n is a, c, g, or t
  misc_feature (1057)..(1057): n is a, c, g, or t
  misc_feature (1082)..(1082): n is a, c, g, or t
  misc_feature (1113)..(1113): n is a, c, g, or t
  misc_feature (1132)..(1132): n is a, c, g, or t
  misc_feature (1134)..(1134): n is a, c, g, or t
  misc_feature (1140)..(1140): n is a, c, g, or t
  misc_feature (1145)..(1145): n is a, c, g, or t
  misc_feature (1147)..(1147): n is a, c, g, or t
  misc_feature (1150)..(1150): n is a, c, g, or t
  misc_feature (1154)..(1154): n is a, c, g, or t
  misc_feature (1171)..(1171): n is a, c, g, or t
  misc_feature (1173)..(1174): n is a, c, g, or t
  misc_feature (1176)..(1176): n is a, c, g, or t
  misc_feature (1181)..(1181): n is a, c, g, or t
  misc_feature (1184)..(1184): n is a, c, g, or t
  misc_feature (1198)..(1199): n is a, c, g, or t
  misc_feature (1217)..(1218): n is a, c, g, or t
atagagagattactatgagaggatcgcatcaccatcaccatcacggatcctatttaggtgacactatagaatcgtcgacccacgcgtccgttcttcagtactgtcaggagatgtatccagagctacagatcacaaatgtgatggaggcaaaccagcgggttagtattgacaactggtgccggagggacaaaaagcaatgcaagagtcgctttgttacacctttcaagtgtctcgtgggtgaatttgtaagtgatgtcctgctagttccagaaaagtgccagtttttccacaaagagcggatggaggtgtgtgagaatcaccagcactggcacacggtagtcaaagaggcatgtctgactcagggaatgaccttatatagctacggcatgctgctcccatgtggggtagaccagttccatggcactgaatatgtgtgctgccctcagacaaagattattggatctgtgtcaaaagaagaggaagaggaagatgaagaggaagaggaagaggaagatgaagaggaagactatgatgtttataaaagtgaatttcctactgaagcagatctggaagacttcacagaagcagctgtggatgaggatgatgaggatgaggaagaaggggaggaagtggtggaggaccgagattactactatgacaccttcaaaggagatgactacaatgaggagaatcctactgaacccggcagcgacggcaccatgtcagacaaggaaattactcatgatgtcaaagctgtctgctcccaggaggcgatgacggggccctgccgggccgtgatgcctcgttggtacttcgacctctccaagggaaagtgcgtgcgctttatatatggtggctgcggcggcaacaggaacaatttttgagtctgaggattattgtatggctgtgtgtaaagcgatgattcctccaactcctctgccaaccaatgatgttgatgtgtatttccagaacctctgcaaatnanaatgaacatgcttcccttnccaaaaggctnaaggacccnctggaaaattccgccccccccaccnaatggnanagggtaaaaaaagaaagggaaaaangcaaaaccttcaacttaaaaacccccccaancaaaaaggccaaccctgantncccccnttccnanccntggntaaacctttaaaaaagnanncnccccntgnaaaccccccctggnngaaacccccggccccaannga

SEQ ID NO: 54 - DNA, 571 bp, Homo Sapiens
  misc_feature (7)..(8): n is a, c, g, or t
  misc_feature (11)..(11): n is a, c, g, or t
  misc_feature (14)..(14): n is a, c, g, or t
  misc_feature (16)..(16): n is a, c, g, or t
  misc_feature (19)..(19): n is a, c, g, or t
  misc_feature (25)..(26): n is a, c, g, or t
  misc_feature (31)..(34): n is a, c, g, or t
  misc_feature (44)..(44): n is a, c, g, or t
  misc_feature (104)..(104): n is a, c, g, or t
  misc_feature (131)..(131): n is a, c, g, or t
  misc_feature (403)..(403): n is a, c, g, or t
  misc_feature (472)..(472): n is a, c, g, or t
  misc_feature (476)..(476): n is a, c, g, or t
  misc_feature (494)..(494): n is a, c, g, or t
  misc_feature (496)..(497): n is a, c, g, or t
  misc_feature (513)..(513): n is a, c, g, or t
  misc_feature (525)..(525): n is a, c, g, or t
  misc_feature (544)..(544): n is a, c, g, or t
  misc_feature (548)..(548): n is a, c, g, or t
  misc_feature (551)..(551): n is a, c, g, or t
  misc_feature (555)..(555): n is a, c, g, or t
  misc_feature (567)..(567): n is a, c, g, or t
cttcccnnatnaangnacntaaatnncaatnnnnaggcatcgcntcaccactcaccatcacggatcctatttaggtgacactatagaatcgtcgacccacgcgntccggagcgcctctgcccgctaccagntactttgtggtagatccgatggcagaatacaacatgcctcagtatatcctgcgagagttcaaggtcacagatgcccgggatggccagtcccggactgtccggcagttccagttcacagactggccggaacagggtgtgccaaagtcgggggagggcttcatcgacttcattggccaagtgcataagactaaggagcagtttggccaggacggccccatctctgtccactgcagtgccggcgtgggcaggacgggcgtcttcatcacgcttancatcgtgctggagcggatgcggtatgaaggcgtggtggacatctttcagacggtgaagatgctacgaanccancggccggccatggtgcanannagaggatgagtaccanttctgttaccangcggcattggtagtacctncggnaancttntaccacttatgncaac

SEQ ID NO: 55 - DNA, 843 bp, Homo Sapiens
tatgagaggtcgcatcaccatcaccatcacggatcctatttaggtgacactatagaatcgtcgacccacgcgtccgcggacgcgtgggctggagagttgatgagggggtacatgacccagtttcccaccttcccaagctggctggggaagcactcgtctacaggcaaacatgatcgtattgttcaggacctggccttgcatatgagtctcagaacttactccagcaaaaggactgtaaacatggattatctgtcgcttctaagggatgcacttgtacagcccttgacctcacaaggagtagacggagtacaggatgttgttgcacttatggacacatattatttgatgaaagaagactttgagaatatcatggaaatcagcagctggggtggcaaacctagtcccttttcaaagctggatcccaaggtgaaagcagccttcacaagagcttacaataaggaagcccaccttactccatactcacttcaagctataaaggcatctagacacagcacaagcccatccctggattcggaatacaatgaagaattaaatgaagatgactctcaatctgatgagaaagaccaagatgctatagaaactgatgccatgatcaagaaaaagacaaaatcttcaaagccttcaaaaccagaaaaagataaggagcccagaaaaggaaaaggaaaaagttcgaagaaatgaaaccatttttcactagcgacagccactttttactctccctcctgaccagtccagctggtctagagaaagccttgttttttcccagagcaaccatgttttagcataatgggatgacctggtgtcccattataaataaagggt

SEQ ID NO: 56 - DNA, 1251 bp, Homo Sapiens
  misc_feature (12)..(12): n is a, c, g, or t
  misc_feature (969)..(969): n is a, c, g, or t
  misc_feature (972)..(972): n is a, c, g, or t
  misc_feature (984)..(984): n is a, c, g, or t
  misc_feature (986)..(986): n is a, c, g, or t
  misc_feature (999)..(999): n is a, c, g, or t
  misc_feature (1004)..(1004): n is a, c, g, or t
  misc_feature (1006)..(1006): n is a, c, g, or t
  misc_feature (1015)..(1015): n is a, c, g, or t
  misc_feature (1026)..(1026): n is a, c, g, or t
  misc_feature (1031)..(1031): n is a, c, g, or t
  misc_feature (1047)..(1047): n is a, c, g, or t
  misc_feature (1084)..(1084): n is a, c, g, or t
  misc_feature (1088)..(1089): n is a, c, g, or t
  misc_feature (1091)..(1091): n is a, c, g, or t
  misc_feature (1102)..(1102): n is a, c, g, or t
  misc_feature (1123)..(1123): n is a, c, g, or t
  misc_feature (1136)..(1136): n is a, c, g, or t
  misc_feature (1138)..(1138): n is a, c, g, or t
  misc_feature (1146)..(1146): n is a, c, g, or t
  misc_feature (1149)..(1149): n is a, c, g, or t
  misc_feature (1152)..(1152): n is a, c, g, or t
  misc_feature (1154)..(1154): n is a, c, g, or t
  misc_feature (1175)..(1175): n is a, c, g, or t
  misc_feature (1178)..(1179): n is a, c, g, or t
  misc_feature (1181)..(1181): n is a, c, g, or t
  misc_feature (1186)..(1186): n is a, c, g, or t
  misc_feature (1210)..(1210): n is a, c, g, or t
  misc_feature (1222)..(1222): n is a, c, g, or t
  misc_feature (1226)..(1227): n is a, c, g, or t
  misc_feature (1229)..(1229): n is a, c, g, or t
  misc_feature (1241)..(1241): n is a, c, g, or t
  misc_feature (1244)..(1244): n is a, c, g, or t
  misc_feature (1248)..(1248): n is a, c, g, or t
  misc_feature (1250)..(1250): n is a, c, g, or t
tagagaaattanctatgagaggatcgcatcaccatcaccatcacggatcctatttaggtgacactatagaatcgtcgacccacgcgtccgcacagattgttggtcctggacccaagccagaagcctctgcaaagcttccttccagacctgcagataactatgacaactttgtcctaccagagttgccatctgtgccagacacactaccaactgcatctgctggtgccagcacctcagcatctgaagacattgactttgatgatctttcccggaggtttgaagagctgaaaaagaaaacataggtctcttaaaccaggcaactttcacgttttgggagttgagactgagcaatttctccttgtaacaaagaatctccatgaaattctgtttcatctgttaaccgtcactcagcacaacactccctctgggctctcttcctgctcctccagattctgctgctttccagttctctgttgatcctgagactaacaattggagactgaggccagagcaactggctcctggcagctgtgcttgtccgtttcctgtcagagtgatcccaggtttcctcctggcccgtcccatggtccctccacaggagtgtgagaggatgggggaagcactgtgggaagaccaccaaagatggctggacagtgggagagagcacgttgtgaagcatcccagcctcgtgttgaggttccagacttagaaacagacccctctgtacagggggattgtggtgagtgagaatcaaggccaccttgtgtgttttctcactctcgaatgcaagtgggagagggaaaatgactcgggacgccattgtaacggttcctggaagctgggccctctcattggcatatacagtactcctcgctgcagggcactgtcccaccgggatccagttgcaaagtttgtcttgacagttgaaggcctcgcttaattgtactggattctcagggagccctctgnggncttttgctttgngngctgtttccttgnaccanangggggcacnggggaaattcngtttncccggaacaaatgggntggattgcattactggcaaaaaagaaaaggggccatncaanncnagggggggctnccgctgcctaaaaaaaaaccnagtcttttgggangnaccggaanccnaangnaaaaaggggaccgtttctttnaanntngtttnggaactttaaaaaaatccaaaaantttggggcccgncccnnantttcccgcttcnggngggngna

SEQ ID NO: 57 - DNA, 1026 bp, Homo Sapiens
  misc_feature (786)..(786): n is a, c, g, or t
  misc_feature (799)..(799): n is a, c, g, or t
  misc_feature (801)..(801): n is a, c, g, or t
  misc_feature (829)..(829): n is a, c, g, or t
  misc_feature (838)..(838): n is a, c, g, or t
  misc_feature (844)..(844): n is a, c, g, or t
  misc_feature (853)..(853): n is a, c, g, or t
  misc_feature (857)..(857): n is a, c, g, or t
  misc_feature (909)..(909): n is a, c, g, or t
  misc_feature (911)..(911): n is a, c, g, or t
  misc_feature (924)..(924): n is a, c, g, or t
  misc_feature (936)..(936): n is a, c, g, or t
  misc_feature (939)..(939): n is a, c, g, or t
  misc_feature (951)..(951): n is a, c, g, or t
  misc_feature (962)..(962): n is a, c, g, or t
  misc_feature (973)..(973): n is a, c, g, or t
  misc_feature (978)..(978): n is a, c, g, or t
  misc_feature (980)..(981): n is a, c, g, or t
  misc_feature (984)..(984): n is a, c, g, or t
  misc_feature (986)..(986): n is a, c, g, or t
  misc_feature (991)..(991): n is a, c, g, or t
  misc_feature (994)..(994): n is a, c, g, or t
  misc_feature (996)..(996): n is a, c, g, or t
  misc_feature (1002)..(1002): n is a, c, g, or t
  misc_feature (1011)..(1011): n is a, c, g, or t
  misc_feature (1014)..(1014): n is a, c, g, or t
  misc_feature (1017)..(1017): n is a, c, g, or t
  misc_feature (1025)..(1025): n is a, c, g, or t
tagagaaattactatgagaggatcgcatcaccatcaccatcacggatcctatttaggtgacactatagaatcgtcgacccacgcgtccgggccaaggtgcttctgcatctggaggagaagacctgtgtggtgggatttgcagggctgcgccagagagccctggtggccgtcacggtcacagacccggccccggtggccgactatctgacctcacagttctatgccctcaactacagcctccggcagcgcatggacatcctggatgtgctgactctggctgcccaggagctgtctaggcctgggtgcctcgggaggactccccaacctggctccccaagtcccaacaccccgtgcctgccagaggcagccgtctctcagcctggcagtgccgtggcgtctgactggcgggtggtggtggaggagcggatcagaagcaagacccggcggctctccaagggtggcccgaggcagggcccggcaggcagccccagcagattcaactccgtggccggccacttcttcttccccctccttcagcgctttgacaggcctctggtgaccttcgacctcttgggagaagaccagctggttctcggaaggctggcgcacaccttaggggccctgatgtgcctggctgttaacaccacggtggctgtggccatgggcaaggccctgctggaattcgtgtgggcccttcgcttccacatcgatgcctacgtgcgccaggggctgttgtcggccgtctcctccgtcctgctcagcctgcctgctgcgcgcctgctggangacctgatggacnanctgctggaaacccggtcctggctggcgnacgtggccnaaaaanacccggacnagantgcaggacgctggcactgaaggcccttgctgcttctgcaaaaactcaaaaanangctccttcccaancccgcgtctccntantcccctggaagncctccccaagnaacaccccccnccaanannaangnaaggnggntnaacaancggccttgnaanaanaaaaccang

SEQ ID NO: 58 - DNA, 1179 bp, Homo Sapiens
  misc_feature (761)..(761): n is a, c, g, or t
  misc_feature (823)..(823): n is a, c, g, or t
  misc_feature (825)..(825): n is a, c, g, or t
  misc_feature (843)..(843): n is a, c, g, or t
  misc_feature (847)..(847): n is a, c, g, or t
  misc_feature (856)..(856): n is a, c, g, or t
  misc_feature (871)..(871): n is a, c, g, or t
  misc_feature (914)..(914): n is a, c, g, or t
  misc_feature (924)..(924): n is a, c, g, or t
  misc_feature (935)..(935): n is a, c, g, or t
  misc_feature (945)..(945): n is a, c, g, or t
  misc_feature (966)..(966): n is a, c, g, or t
  misc_feature (975)..(975): n is a, c, g, or t
  misc_feature (978)..(978): n is a, c, g, or t
  misc_feature (981)..(981): n is a, c, g, or t
  misc_feature (1003)..(1003): n is a, c, g, or t
  misc_feature (1008)..(1008): n is a, c, g, or t
  misc_feature (1018)..(1018): n is a, c, g, or t
  misc_feature (1022)..(1022): n is a, c, g, or t
  misc_feature (1034)..(1034): n is a, c, g, or t
  misc_feature (1039)..(1039): n is a, c, g, or t
  misc_feature (1049)..(1049): n is a, c, g, or t
  misc_feature (1052)..(1052): n is a, c, g, or t
  misc_feature (1054)..(1054): n is a, c, g, or t
  misc_feature (1061)..(1061): n is a, c, g, or t
  misc_feature (1065)..(1065): n is a, c, g, or t
  misc_feature (1070)..(1070): n is a, c, g, or t
  misc_feature (1081)..(1081): n is a, c, g, or t
  misc_feature (1088)..(1088): n is a, c, g, or t
  misc_feature (1095)..(1095): n is a, c, g, or t
  misc_feature (1097)..(1097): n is a, c, g, or t
  misc_feature (1106)..(1106): n is a, c, g, or t
  misc_feature (1112)..(1112): n is a, c, g, or t
  misc_feature (1123)..(1123): n is a, c, g, or t
  misc_feature (1129)..(1129): n is a, c, g, or t
  misc_feature (1132)..(1133): n is a, c, g, or t
  misc_feature (1138)..(1138): n is a, c, g, or t
  misc_feature (1144)..(1144): n is a, c, g, or t
  misc_feature (1153)..(1155): n is a, c, g, or t
  misc_feature (1162)..(1163): n is a, c, g, or t
  misc_feature (1170)..(1170): n is a, c, g, or t
  misc_feature (1179)..(1179): n is a, c, g, or t
tagagaaattactatgagaggatcgcatcaccatcaccatcacggatcctatttaggtgacactatagaatcgtcgacccacgcgtccggaccccgaaaagagaaggggagagcgaggggacgagagcggaggaggaagatgcaactgactcgctgctgcttcgtgttcctggtgcagggtagcctctatctggtcatctgtggccaggatgatggtcctcccggctcagaggaccctgagcgtgatgaccacgagggccagccccggccccgggtgcctcggaagcggggccacatctcacctaagtcccgccccatggccaattccactctcctagggctgctggccccgcctggggaggcttggggcattcttgggcagccccccaaccgcccgaaccacagccccccaccctcagccaaggtgaagaaaatctttggctggggcgacttctactccaacatcaagacggtggccctgaacctgctcgtcacagggaagattgtggaccatggcaatgggaccttcagcgtccacttccaacacaatgccacaggccagggaaacatctccatcagcctcgtgccccccagtaaagctgtagagttccaccaggaacagcagatcttcatcgaagccaaggcctccaaaatcttcaactgccggatggagtgggagaaggtagaacggggccgccggacctcgctttgcacccacgacccagccaagatctgctcccgagaccacgctcagagctcanccacctggagctgctcccagcccttcaaagtcgtctgtgtctacatcgccttctacagcaangnactatcgggctggtccanaagntgtgcccanattacaactacatantgataccccctactacccatctgggtgacccggggcaggccanaaaagccagncaagggcttgnaaagaaaagncctgcccatgcaagaaacatntggaaaccnggncanggaaagggtttgggccctcagncaggnaggggggtgnaaanaaaaaaaaattnccaantggggcccanggncnaaatttncaantgggnaaaaaaaaggntccaaantgtttgntnccaaccttnaacttngggattgattnattccnggnnccctngggggngagatgggnnnttttggnncccccanagggttttn

SEQ ID NO: 59 - DNA, 1032 bp, Homo Sapiens
  misc_feature (193)..(193): n is a, c, g, or t
  misc_feature (205)..(205): n is a, c, g, or t
  misc_feature (208)..(209): n is a, c, g, or t
  misc_feature (227)..(227): n is a, c, g, or t
  misc_feature (308)..(308): n is a, c, g, or t
  misc_feature (312)..(312): n is a, c, g, or t
  misc_feature (323)..(325): n is a, c, g, or t
  misc_feature (352)..(352): n is a, c, g, or t
  misc_feature (358)..(359): n is a, c, g, or t
  misc_feature (441)..(441): n is a, c, g, or t
  misc_feature (508)..(509): n is a, c, g, or t
  misc_feature (520)..(520): n is a, c, g, or t
  misc_feature (527)..(528): n is a, c, g, or t
  misc_feature (535)..(536): n is a, c, g, or t
  misc_feature (569)..(569): n is a, c, g, or t
  misc_feature (648)..(648): n is a, c, g, or t
  misc_feature (755)..(755): n is a, c, g, or t
  misc_feature (774)..(774): n is a, c, g, or t
  misc_feature (788)..(788): n is a, c, g, or t
  misc_feature (840)..(840): n is a, c, g, or t
  misc_feature (842)..(844): n is a, c, g, or t
  misc_feature (850)..(850): n is a, c, g, or t
  misc_feature (861)..(861): n is a, c, g, or t
  misc_feature (863)..(863): n is a, c, g, or t
  misc_feature (868)..(868): n is a, c, g, or t
  misc_feature (893)..(894): n is a, c, g, or t
  misc_feature (909)..(909): n is a, c, g, or t
  misc_feature (923)..(923): n is a, c, g, or t
  misc_feature (945)..(945): n is a, c, g, or t
  misc_feature (947)..(947): n is a, c, g, or t
  misc_feature (950)..(950): n is a, c, g, or t
  misc_feature (955)..(955): n is a, c, g, or t
  misc_feature (960)..(960): n is a, c, g, or t
  misc_feature (962)..(963): n is a, c, g, or t
  misc_feature (978)..(978): n is a, c, g, or t
  misc_feature (983)..(984): n is a, c, g, or t
  misc_feature (1027)..(1027): n is a, c, g, or t
  misc_feature (1031)..(1031): n is a, c, g, or t
aatagagagattactatgagaggatcgcatcaccatcaccatcacggatcctatttaggtgacactatagaatcgtcgacccacgcgtccgtgacttattgctgaagactagggaaagtgatcgactggaggagaagggcagcctaactgaaggggccttggctcattctgggaaccctgtatcaaaaggagnccatgaagaccntcnnctggataccgaggctggngccccacactgtggaacaaacccacagcttgctcaggatccatcccagaatcagcatacatcaaatccaacgcacagttcntaanatgtgaagccnnnaaccctcccgctggataaaagcattanccatcnnatcgagtctcccagtgaaaggcggaagtctataagtggaaagaagctgtgctcttcctgtgggcttcctttgggtaaagganctgcaatgatcatcgagaccctcaatctctattttcacatccagtgtttcaggtgtggaatttgtannggccagcttgnacatgcnntgagtgnnacggatgttaggattcaaaatggtctcctgaantgtaatgattgctacatgcgatccagcaagtgccgggcagcctacaacattgtgacacggctttcaagcttccggatcnctcaccatttctttactgagagtgtcccctggcaactgcttaacaaaatcccaagctcaggggcttctcagcatttacctaatttctgaaaggctcttctgagaggnggtatctgttctttcgtancacagtgtttatgntttttcccggtttattgttttggatttttttttttttttttgcatttgcccngnnnacacanaaaaaatatgngngttgntaatgatccctgaatagctcaaaannaggtttttaacatgntcaaccaggcttantggtttaaaatggggttactcncntcnttggngaatnannctaaatggatgcaanaaacnntgtttttgttttaaaaaggtccaaggatttaaccccttttttntttna

SEQ ID NO: 60 - DNA, 1175 bp, Homo Sapiens
  misc_feature (736)..(736): n is a, c, g, or t
  misc_feature (743)..(743): n is a, c, g, or t
  misc_feature (750)..(750): n is a, c, g, or t
  misc_feature (804)..(804): n is a, c, g, or t
  misc_feature (857)..(857): n is a, c, g, or t
  misc_feature (872)..(872): n is a, c, g, or t
  misc_feature (874)..(874): n is a, c, g, or t
  misc_feature (899)..(899): n is a, c, g, or t
  misc_feature (917)..(917): n is a, c, g, or t
  misc_feature (922)..(922): n is a, c, g, or t
  misc_feature (943)..(943): n is a, c, g, or t
  misc_feature (967)..(967): n is a, c, g, or t
  misc_feature (973)..(973): n is a, c, g, or t
  misc_feature (989)..(989): n is a, c, g, or t
  misc_feature (999)..(999): n is a, c, g, or t
  misc_feature (1008)..(1008): n is a, c, g, or t
  misc_feature (1010)..(1010): n is a, c, g, or t
  misc_feature (1020)..(1020): n is a, c, g, or t
  misc_feature (1026)..(1026): n is a, c, g, or t
  misc_feature (1031)..(1031): n is a, c, g, or t
  misc_feature (1033)..(1033): n is a, c, g, or t
  misc_feature (1037)..(1037): n is a, c, g, or t
  misc_feature (1041)..(1041): n is a, c, g, or t
  misc_feature (1053)..(1053): n is a, c, g, or t
  misc_feature (1056)..(1056): n is a, c, g, or t
  misc_feature (1063)..(1063): n is a, c, g, or t
  misc_feature (1067)..(1067): n is a, c, g, or t
  misc_feature (1073)..(1073): n is a, c, g, or t
  misc_feature (1078)..(1078): n is a, c, g, or t
  misc_feature (1082)..(1082): n is a, c, g, or t
  misc_feature (1088)..(1088): n is a, c, g, or t
  misc_feature (1090)..(1090): n is a, c, g, or t
  misc_feature (1099)..(1099): n is a, c, g, or t
  misc_feature (1101)..(1101): n is a, c, g, or t
  misc_feature (1103)..(1103): n is a, c, g, or t
  misc_feature (1108)..(1108): n is a, c, g, or t
  misc_feature (1110)..(1111): n is a, c, g, or t
  misc_feature (1116)..(1116): n is a, c, g, or t
  misc_feature (1126)..(1126): n is a, c, g, or t
  misc_feature (1134)..(1134): n is a, c, g, or t
  misc_feature (1140)..(1140): n is a, c, g, or t
  misc_feature (1142)..(1142): n is a, c, g, or t
  misc_feature (1159)..(1159): n is a, c, g, or t
  misc_feature (1163)..(1163): n is a, c, g, or t
  misc_feature (1166)..(1166): n is a, c, g, or t
  misc_feature (1175)..(1175): n is a, c, g, or t
aatagagaaattactatgagaggatcgcatcaccatcaccatcacggatcctatttaggtgacactatagaatcgtcgacccacgcgtccgcccgcagcggccccctcccctcctcctctggctcttcctcctcctcctcccagctcagcgtggctaccctggggcgtagcccctccccaaagagcgctctactcacccagaatggcacgggcagccttcctcgcaacctggcagccacactgcaggacatcgagaccaagcgccaactagctctgcagcagaagggacaacaagtgattgaagagcagcggcggcgactggctgagctgaagcagaaagcggcagctgaggcacagtgccagtgggatgcccttcacggggcagcacccttcccagcgggcccctcgggcttcccccctctcatgcaccactctatcctacaccacctgcctgcggggcgggagcgtggggaggagggtgagcacgcctatgatacgctgagtctggagagctctgacagcatggagaccagcatctccaccgggggcaactcggcctgctcccctgacaacatgtccagcgcgagtggtctggacatggggaagatcgaggagatggagaagatgctgaaagaggctcatgcagagaagaaccggctcatggagtcgagggagcgggagatggagctgcggcggcaggccctggaggaggagcggcggaggcgtgagcaggtanaacggangctgcanagtgagagtgcccggaggcagcagctggtcgagaaggaggtcaagatgcggganaacaattttcccaggcacgacccctgacccgctacctgccaatccggaaggangactttgacctgaananacatattgagtcatcgggccatggngttgatacctgcctgcangtggngctcaacacaaggtctgccgnggctatttggtcaaaatgggcggnaaaatnaaatcatggaaaaacnctggtttgtnttcaacggntnaagcgcaccntttttnattangngaanaacntgaaacaaactnaanggaattntttnttttcnggccnttgnaggaangntataaaaancncntgggnannggaancaaaaacccnaaacccanccttcncnttttgggaaaaacccangaanggntgtataatn

SEQ ID NO: 61 - DNA, 1158 bp, Homo Sapiens
  misc_feature (1)..(1): n is a, c, g, or t
  misc_feature (913)..(913): n is a, c, g, or t
  misc_feature (917)..(918): n is a, c, g, or t
  misc_feature (944)..(944): n is a, c, g, or t
  misc_feature (982)..(982): n is a, c, g, or t
  misc_feature (988)..(988): n is a, c, g, or t
  misc_feature (1019)..(1019): n is a, c, g, or t
  misc_feature (1022)..(1022): n is a, c, g, or t
  misc_feature (1031)..(1031): n is a, c, g, or t
  misc_feature (1047)..(1048): n is a, c, g, or t
  misc_feature (1050)..(1050): n is a, c, g, or t
  misc_feature (1052)..(1052): n is a, c, g, or t
  misc_feature (1066)..(1066): n is a, c, g, or t
  misc_feature (1069)..(1070): n is a, c, g, or t
  misc_feature (1074)..(1075): n is a, c, g, or t
  misc_feature (1089)..(1089): n is a, c, g, or t
  misc_feature (1115)..(1115): n is a, c, g, or t
  misc_feature (1123)..(1123): n is a, c, g, or t
  misc_feature (1126)..(1126): n is a, c, g, or t
  misc_feature (1135)..(1135): n is a, c, g, or t
  misc_feature (1142)..(1142): n is a, c, g, or t
  misc_feature (1144)..(1144): n is a, c, g, or t
  misc_feature (1148)..(1149): n is a, c, g, or t
  misc_feature (1157)..(1157): n is a, c, g, or t
natagagagattactatgagaggatcgcatcaccatcaccatcacggatcctatttaggtgacactatagaatcgtcgacccacgcgtccggcaaggtgaaaccacctaagaagcaagaggaaaaggagaagaagggaaagggaaagccacaggaagatgagctgaaggactctttggctgatgatgatagctcctccaccaccacagagacctccaaccctgacacagaaccgctcctcaaggaggatacagaaaagcaaaagggaaaacaagccatgcctgaaaaacatgaaagtgaaatgtctcaagtgaagcaaaaaagcaaaaaactcttaaatattaagaaagaaatcccaacagatgtgaaacccagttcattagaactaccatatactccccctttggaaagtaagcaacgtagaaatctcccaagcaagattcctcttccaactgcaatgacaagtggatccaaatcacgaaatgcccagaaaacaaaaggtacaagtaagttagtggataacagaccacctgccctagcaaaattcctcccgaatagtcaagaattaggcaacaccagtagctcagagggtgaaaaagactctcctccaccggagtgggattccgttccagttcacaaacctggcagctctactgatagtctttataaactttctctgcaaaccctcaacgcagacattttcttaaaacaacgccagacctcaccgacacctgcttccccgtctcccccagctgccccctgcccctttgtggcccggggcagctacagcagcatcgtcaacagcagctccagcagtgaccctaaaataaaacagccaaatggaagcaaacacaagttgacaaaggcagcctcgctcccgggcaagaacggcaaccccacttttgctgcagtcncggnntggctacgacaagagccccaggtggnaatggctttgctaaagtttcttcaaacaaacaggtttntccgcnagccttggcatttcccccgctcctgttgacngcngatggttcnaacagctcgggtttgnngnantccgtcagcaaccnagnngccnnaatttcctcccctncattcgttttccccctttgggaactntttttatnttnctggggaanttttccncnaaanngggatttnt

SEQ ID NO: 62 - DNA, 724 bp, Homo Sapiens
ctatgagaggatcgcatcaccatcaccatcacggatcctatttaggtgacactatagaatcgtcgacccacgcgtccgcggacgcgtgggcggacgcgtggggggcgcgaccgcgggtactctgctgccggcttctcggagcggcgctgggcgaccagagcagggtcgagatgtcctacatcccgggccagccggtcaccgccgtggtgcaaagagttgaaattcacaagctgcgtcaaggtgagaacttaatcctgggtttcagcattggaggtggaatcgaccaggacccttcccagaatcccttctctgaagacaagacggacaagggtatttatgtcacacgggtgtctgaaggaggccctgctgaaatcgctgggctgcagattggagacaagatcatgcaggtgaacggctgggacatgaccatggtcacacacgaccaggcccgcaagcggctcaccaagcgctcggaggaggtggtgcgtctgctggtgacgcggcagtcgctgcagaaggccgtgcagcagtccatgctgtcctagcagccaccaccatctgcgactcctgcctgccgcctctctgtacagtaacgccacttccacactctgtccccatctggcttctgctgaccgctgggccccagctcagaagggctatagctggtcccagaggcctggcctggccttccttcccttctcccatccctggcctgggggcctct

SEQ ID NO: 63 - DNA, 1244 bp, Homo Sapiens
  misc_feature (915)..(915): n is a, c, g, or t
  misc_feature (951)..(951): n is a, c, g, or t
  misc_feature (958)..(958): n is a, c, g, or t
  misc_feature (985)..(985): n is a, c, g, or t
  misc_feature (1013)..(1013): n is a, c, g, or t
  misc_feature (1023)..(1023): n is a, c, g, or t
  misc_feature (1027)..(1027): n is a, c, g, or t
  misc_feature (1035)..(1035): n is a, c, g, or t
  misc_feature (1039)..(1039): n is a, c, g, or t
  misc_feature (1051)..(1051): n is a, c, g, or t
  misc_feature (1056)..(1056): n is a, c, g, or t
  misc_feature (1063)..(1063): n is a, c, g, or t
  misc_feature (1067)..(1068): n is a, c, g, or t
  misc_feature (1078)..(1078): n is a, c, g, or t
  misc_feature (1084)..(1084): n is a, c, g, or t
  misc_feature (1088)..(1088): n is a, c, g, or t
  misc_feature (1091)..(1091): n is a, c, g, or t
  misc_feature (1095)..(1095): n is a, c, g, or t
  misc_feature (1097)..(1097): n is a, c, g, or t
  misc_feature (1099)..(1099): n is a, c, g, or t
  misc_feature (1108)..(1109): n is a, c, g, or t
  misc_feature (1114)..(1114): n is a, c, g, or t
  misc_feature (1130)..(1130): n is a, c, g, or t
  misc_feature (1140)..(1140): n is a, c, g, or t
  misc_feature (1143)..(1143): n is a, c, g, or t
  misc_feature (1162)..(1162): n is a, c, g, or t
  misc_feature (1164)..(1164): n is a, c, g, or t
  misc_feature (1166)..(1166): n is a, c, g, or t
  misc_feature (1170)..(1170): n is a, c, g, or t
  misc_feature (1176)..(1176): n is a, c, g, or t
  misc_feature (1201)..(1201): n is a, c, g, or t
  misc_feature (1204)..(1204): n is a, c, g, or t
  misc_feature (1207)..(1207): n is a, c, g, or t
  misc_feature (1223)..(1224): n is a, c, g, or t
  misc_feature (1230)..(1230): n is a, c, g, or t
  misc_feature (1234)..(1234): n is a, c, g, or t
  misc_feature (1243)..(1243): n is a, c, g, or t
ctaatagagagattactatgagaggatcgcatcaccatcaccatcacggatcctatttaggtgacactatagaatcgtcgacccacgcgtccggaaggatggaagaaaattcctctggcaataccatgtcagcctcttcgatgtttaatacagaagaaagaaaatgtttgcagactcacagagtcacggtgcatggggtcccagggccagagccctttaccgttttcactattaatggaggcaccaaggcaaagcagcttctgcagcaaattctgacaaatgaacaagacatcaaacctgttaccacagactattttttgatggaagaaaaatattttatatctaaagaaaagaatgaatgtaggaaacaaccattccagagagccattggtccagaagaggagatcatgcaaattttaagcagctggtttccagaagagggatacatgggcaggattgtcttaaaaacccagcaggaaaacctagaagagaaaaacattgttcaagatgacaaagaggtgatcttgagctcagaggaggagagtttctttgtccaagtgcatgatgtttctccagagcaacctcgaacagtcatcaaagcaccccgcgtcagcactgcacaggatgtcattcagcagaccttatgcaaagccaaatattcctacagcatcctgagcaaccccaatccaagcgactatgtgcttttggaagaggtggtgaaagacactaccaacaagaagactaccacaccaaagtcctctcagcgggtccttctggatcaggagtgtgtgtttcaagcccaaagcaagtggaaaggtgcaggaaaattcatccttaagctaaaggagcaggtgcaggcatctcgagaaaataaaaagaaaggcatttctttcgcaagtgaactcaagaagctcnccaagtccactaaacagcccccgaggacttacatcncctttcncagctctttgaccctcgaaagtatccnaacccaaggaggaaaaaacctggggggnggcttgtccncccngtgacccntggnattaccgaccgngactnaagggcncctnntttacccccngggaanatcnttnagcnanantttaaaganngaaantgggggaaaaaaatantttttttccnccnaccttaaccggaaaatggntnanttcngaactnaaccctcccccttgggaaatccttnctnagnaaaaccaaatggcccnnggcctntttnccccccccnt

SEQ ID NO: 64 - DNA, 654 bp, Homo Sapiens
  misc_feature (3)..(3): n is a, c, g, or t
  misc_feature (631)..(637): n is a, c, g, or t
  misc_feature (640)..(644): n is a, c, g, or t
  misc_feature (646)..(654): n is a, c, g, or t
cantagagaaattactatgagaggatcgcatcaccatcaccatcacggatcctatttaggtgacactatagaatcgtcgacccacgcgtccgaggaagggggcctcctggactgcgggctccggctgaagaaggtcagcttcgctgagcgcggcgcggggcggcgtcggcccggcccaagcccggaggccctcctggaggaagggagccccactatggtggagaaggggctggagccgggagtgttcaccctggccgaggaggacgacgaggcggagggggctcccggcagccctgaacgggagcccccggccatcttgttccgccgggccgggggcgagggccgagaccaggggcccgacgggggcccggacccggaacccggctccaacagcgattcgacccgtaggcagagacggcagaaccggtcgtcttggattgacccgccggaggaggaacactcgccccagctcacccaggcagagctggagagctgtatgaagaagtacgaggacacgttccaggactaccaggagatgttcgtgcagttcggctacgttgtgctcttctcgtccgccttccccctggcggcgctgtgcgccctggtcaacaacctcattgagatccgcagnnnnnnnttnnnnntnnnnnnnnn

SEQ ID NO: 65 - DNA, 1346 bp, Homo Sapiens
  misc_feature (942)..(942): n is a, c, g, or t
  misc_feature (970)..(970): n is a, c, g, or t
  misc_feature (989)..(990): n is a, c, g, or t
  misc_feature (1028)..(1028): n is a, c, g, or t
  misc_feature (1037)..(1037): n is a, c, g, or t
  misc_feature (1040)..(1040): n is a, c, g, or t
  misc_feature (1048)..(1048): n is a, c, g, or t
  misc_feature (1053)..(1053): n is a, c, g, or t
  misc_feature (1061)..(1061): n is a, c, g, or t
  misc_feature (1063)..(1063): n is a, c, g, or t
  misc_feature (1067)..(1067): n is a, c, g, or t
  misc_feature (1077)..(1077): n is a, c, g, or t
  misc_feature (1082)..(1082): n is a, c, g, or t
  misc_feature (1084)..(1084): n is a, c, g, or t
  misc_feature (1123)..(1123): n is a, c, g, or t
  misc_feature (1126)..(1126): n is a, c, g, or t
  misc_feature (1141)..(1141): n is a, c, g, or t
  misc_feature (1146)..(1146): n is a, c, g, or t
  misc_feature (1149)..(1149): n is a, c, g, or t
  misc_feature (1151)..(1151): n is a, c, g, or t
  misc_feature (1159)..(1159): n is a, c, g, or t
  misc_feature (1163)..(1163): n is a, c, g, or t
  misc_feature (1174)..(1174): n is a, c, g, or t
  misc_feature (1181)..(1181): n is a, c, g, or t
  misc_feature (1186)..(1186): n is a, c, g, or t
  misc_feature (1189)..(1189): n is a, c, g, or t
  misc_feature (1195)..(1196): n is a, c, g, or t
  misc_feature (1213)..(1213): n is a, c, g, or t
  misc_feature (1232)..(1234): n is a, c, g, or t
  misc_feature (1238)..(1238): n is a, c, g, or t
  misc_feature (1251)..(1251): n is a, c, g, or t
  misc_feature (1257)..(1257): n is a, c, g, or t
  misc_feature (1276)..(1276): n is a, c, g, or t
  misc_feature (1278)..(1278): n is a, c, g, or t
  misc_feature (1288)..(1288): n is a, c, g, or t
  misc_feature (1294)..(1294): n is a, c, g, or t
  misc_feature (1311)..(1311): n is a, c, g, or t
  misc_feature (1316)..(1316): n is a, c, g, or t
  misc_feature (1319)..(1319): n is a, c, g, or t
  misc_feature (1321)..(1321): n is a, c, g, or t
  misc_feature (1325)..(1325): n is a, c, g, or t
  misc_feature (1329)..(1329): n is a, c, g, or t
  misc_feature (1338)..(1338): n is a, c, g, or t
  misc_feature (1341)..(1341): n is a, c, g, or t
  misc_feature (1345)..(1345): n is a, c, g, or t
tagagaaattactatgagaggatcgcatcaccatcaccatcacggatcctatttaggtgacactatagaatcgtcgacccacgcgtccgatttcctctccagtgagagcacagacagtagcattccatggttcctccgggttcaggagttggcccatgacagtttgattgctgctactcgtgcacaactggcaaagaatgcaaaaaccagcagcaatggagaaaatgtccaccttggttctggtgatgggcagtcaaaagattctgggccccttcctcaagtggaaaagaagctcaagtgtacagttgaaggttgtgaccggacatttgtatggccagctcactttaaataccacctcaagactcatcgaaatgaccgctccttcatctgtcctgcagaaggttgtgggaaaagcttctatgtgctgcagaggctgaaggtgcacatgaggacccacaatggagagaagccctttatgtgccatgagtctggctgtggtaagcagtttactacagctggaaacctgaagaaccaccggcgcatccacacaggagagaaacctttcctttgtgaagcccaaggatgtggccgttcctttgctgagtattctagcctccgaaaacatctggtggttcactcaggagagaagcctcatcagtgccaagtctgtgggaagaccttctctcagagtggaagcaggaatgtgcatatgagaaagcatcacctgcagctgggagcagctgggagtcaagagcaggagcaaactgctgagccactaatgggcagtagtttgcttgaagaggcttcagtacccagtaaaaacctggtgtctatgaattcccagcccagccttggtggagagtccttgaacctaccaaataccaattctatcctgggagttgatgatgttatggaagaacttaacttttaaaacatttaacnagaaacataaccaggttttacagagganatataaagcaatttccccnnaccttcaaaagccatatcttctggaaaaaaaaaaaggnctctctagnaanaccttgcnccccntctggtananaaanttccccccangttancnaggccaggccccctttccctgaaaacttaaaaaaagggnctngctgaaagaatcccncgttnccngntcttcagngccngaagggaaccnctccccnggggnacntgccanncggggaggcaaccatanaaatttcgtcttaacggcnnnaatnccccaaaattctnaacccngggaatttacttaaaacgnantaaccggggntctacnccggaaaaaaccttttngatcnaangntaangggnaaaggagcnttncccna

SEQ ID NO: 66 - DNA, 942 bp, Homo Sapiens
  misc_feature (1)..(1): n is a, c, g, or t
  misc_feature (4)..(4): n is a, c, g, or t
  misc_feature (807)..(807): n is a, c, g, or t
  misc_feature (839)..(839): n is a, c, g, or t
  misc_feature (863)..(863): n is a, c, g, or t
  misc_feature (886)..(886): n is a, c, g, or t
  misc_feature (894)..(894): n is a, c, g, or t
  misc_feature (908)..(908): n is a, c, g, or t
  misc_feature (912)..(912): n is a, c, g, or t
  misc_feature (918)..(918): n is a, c, g, or t
  misc_feature (921)..(921): n is a, c, g, or t
  misc_feature (923)..(923): n is a, c, g, or t
  misc_feature (925)..(925): n is a, c, g, or t
  misc_feature (928)..(930): n is a, c, g, or t
  misc_feature (932)..(934): n is a, c, g, or t
  misc_feature (936)..(936): n is a, c, g, or t
  misc_feature (938)..(938): n is a, c, g, or t
  misc_feature (940)..(942): n is a, c, g, or t
naantagagaaattaactatgagaggatcgcatcaccatcaccatcacggatcctatttaggtgacactatagaatcgtcgacccacgcgtccggcgccgccgacgcccgccctcccgcagagccctccgccgacctcttggtgaacctgagccgctgccgacgcctcatcgtggtgctttcggacgccttcctgagccgggcctggtgcagccacagcttccgggagggcctgtgccggctgctggagctcacccgcagacccatcttcatcaccttcgagggccagaggcgcgaccccgcgcacccggcgctccgcctgctgcgccagcaccgccacctggtgaccttgctgctctggaggcccggctccgtgactccttcctccgatttttggaaagaagtgcagctggcgctgccgcggaaggtgcggtacaggccggtggaaggagacccccagacgcagctgcaggacgacaaggaccccatgctgattcttcgaggccgagtccctgagggccgggccctggactcagaggtggacccggaccctgagggcgacctgggtgtccgggggcctgtttttggagagccatcagctccaccgcacaccagtggggtctcgctgggagagagccggagcagcgaagtggacgtctcggatctcggctcgcgaaactacagtgcccgcacagacttctactgcctggtgtccaaggatgatatgtagctcccaccccagagtgcaggatcatagggacagcgggggccagggcagcggcgtcgctcctctgctcaacaggaccanaacccctgccagcagccctgggaccctgccancagccctgggaaaaaggctgtggnctcaagggcgcctccaatgccanaaaataantctttttggatttntganaaaaanaanananaannnannnananannn

SEQ ID NO: 67 - DNA, 1182 bp, Homo Sapiens
  misc_feature (858)..(858): n is a, c, g, or t
  misc_feature (909)..(909): n is a, c, g, or t
  misc_feature (952)..(952): n is a, c, g, or t
  misc_feature (978)..(978): n is a, c, g, or t
  misc_feature (980)..(980): n is a, c, g, or t
  misc_feature (991)..(991): n is a, c, g, or t
  misc_feature (993)..(993): n is a, c, g, or t
  misc_feature (1012)..(1012): n is a, c, g, or t
  misc_feature (1023)..(1023): n is a, c, g, or t
  misc_feature (1028)..(1028): n is a, c, g, or t
  misc_feature (1037)..(1037): n is a, c, g, or t
  misc_feature (1058)..(1058): n is a, c, g, or t
  misc_feature (1065)..(1065): n is a, c, g, or t
  misc_feature (1070)..(1070): n is a, c, g, or t
  misc_feature (1073)..(1073): n is a, c, g, or t
  misc_feature (1076)..(1076): n is a, c, g, or t
  misc_feature (1080)..(1080): n is a, c, g, or t
  misc_feature (1095)..(1095): n is a, c, g, or t
  misc_feature (1099)..(1100): n is a, c, g, or t
  misc_feature (1108)..(1108): n is a, c, g, or t
  misc_feature (1110)..(1110): n is a, c, g, or t
  misc_feature (1122)..(1122): n is a, c, g, or t
  misc_feature (1126)..(1126): n is a, c, g, or t
  misc_feature (1133)..(1133): n is a, c, g, or t
  misc_feature (1138)..(1139): n is a, c, g, or t
  misc_feature (1144)..(1144): n is a, c, g, or t
  misc_feature (1147)..(1148): n is a, c, g, or t
  misc_feature (1159)..(1159): n is a, c, g, or t
  misc_feature (1167)..(1167): n is a, c, g, or t
  misc_feature (1182)..(1182): n is a, c, g, or t
caatagagaaattactatgagaggatcgcatcaccatcaccatcacggatcctatttaggtgacactatagaatcgtcgacccacgcgtccggcagtcatggcgtactccacagtgcagagagtcgctctggcttctgggcttgtcctggctctgtcgctgctgctgcccaaggccttcctgtcccgcgggaagcggcaggagccgccgccgacacctgaaggaaaattgggccgatttccacctatgatgcatcatcaccaggcaccctcagatggccagactcctggggctcgtttccagaggtctcaccttgccgaggcatttgcaaaggccaaaggatcaggtggaggtgctggaggaggaggtagtggaagaggtctgatggggcagattattccaatctacggttttgggatttttttatatatactgtacattctatttaagctctcaaaggggaaaacaactgcagaggatgggaaatgctatactgccatgcctggaaacacccacaggaaaattaccagttttgagcttgctcaactgcaagaaaaactgaaggagacagaagcagccatggaaaaattaatcaacagagtgggacctaatggtgagagagcacagactgtgacttctgaccaagagaaacggttgctacatcagctccgagaaatcaccagggtcatgaaagaaggaaaattcattgacagattttctccagagaaagaagctgaggaggccccttacatggaggactgggaaggttaccctgaagagacttacccaatttatgacctttcagactgtatcaagcgtaggcaagaaacaatcttggtggattaccctgacccaaaanaactttctgctgaagaaatagctgaaagaatgggaatgatagaagaggaanaatcagatcatttgggttgggaaagtctgccactgacccagancccagaaaaaaattctgttacctcgngngatccaaagcnanaaaatgttcctgctgtttncatgaaaacangatcntgctgtctnggcaaaaaatgctggaatcantgcaaanagctnccngancaanaggaaacccccaaanaaannggtcccanantttaaaaagaanggtngggctcnccccnnaaaanctnnacgggcgcttnttaagaanctaacccccaggttn

SEQ ID NO: 68 - DNA, 1046 bp, Homo Sapiens
  misc_feature (1)..(1): n is a, c, g, or t
  misc_feature (816)..(816): n is a, c, g, or t
  misc_feature (835)..(835): n is a, c, g, or t
  misc_feature (850)..(850): n is a, c, g, or t
  misc_feature (855)..(855): n is a, c, g, or t
  misc_feature (861)..(861): n is a, c, g, or t
  misc_feature (881)..(881): n is a, c, g, or t
  misc_feature (884)..(884): n is a, c, g, or t
  misc_feature (890)..(890): n is a, c, g, or t
  misc_feature (944)..(944): n is a, c, g, or t
  misc_feature (951)..(951): n is a, c, g, or t
  misc_feature (956)..(956): n is a, c, g, or t
  misc_feature (970)..(970): n is a, c, g, or t
  misc_feature (980)..(980): n is a, c, g, or t
  misc_feature (983)..(983): n is a, c, g, or t
  misc_feature (990)..(990): n is a, c, g, or t
  misc_feature (997)..(997): n is a, c, g, or t
  misc_feature (1003)..(1003): n is a, c, g, or t
  misc_feature (1010)..(1010): n is a, c, g, or t
  misc_feature (1013)..(1013): n is a, c, g, or t
  misc_feature (1020)..(1020): n is a, c, g, or t
  misc_feature (1025)..(1026): n is a, c, g, or t
  misc_feature (1031)..(1031): n is a, c, g, or t
  misc_feature (1033)..(1034): n is a, c, g, or t
  misc_feature (1036)..(1037): n is a, c, g, or t
  misc_feature (1041)..(1046): n is a, c, g, or t
naatagagaaattactatggagaggatcgcatcaccatcaccatcacggatcctatttaggtgacactatagaatcgtcgacccacgcgtccgacctggagaacctcagtttggccttcaccaatgtaaccagtgcctgcgccgagcacctcatcaaactgccttcgctcaagcagctgaacctgtggtccactcagtttggagacgctggccttcggctcctgtcggaacacctcaccatgctccaggtgctgaacctgtgcgagaccccggtcacagacgctggcctgctggccctgagctccatgaagagtctctgcagtttaaacatgaacagcaccaagctctcagctgacacctacgaagatctgaaggccaagcttcccaatttgaaggaagtggacgtccgctacaccgaagcctggtgaagctcccagctcaaggcaggaagacgtttgcaaccgcgacaaaataactcttgactaacagccgcagagcagccggtcctggggtcccaccctggtgccctggctgtgagatagatggggagtctttctgggggcggaggggggagggggttggggagggggcccacaagcacgcccagcccccgccgaattcttttagcttcgtaattggaacctttgacctgatctaaagtggactttgtagcaacaagaggagcatcagcgggtcggggaggggtttgggggtgggctggggggtgggggaccctttgtggattttctttgcctttgtgtttgatgccgtcgtgtgggaaaagtcaactccgatgccaccattgcgggccggacnaaggatgctttcttcctanaggctccgagctganctgcnaactcnccccccgcccttgggacaanaanacccantcacatcactgcacccgtcctgtgtcctcaccattgctatgcaaagtgattctngttgtanataanatttaaataatgcncctatttaanaantgttganaaattgngggtcnggaaccnccncttattntgaannttttnanngnncccnnnnnn

SEQ ID NO: 69 - DNA, 970 bp, Homo Sapiens
  misc_feature (550)..(550): n is a, c, g, or t
  misc_feature (807)..(807): n is a, c, g, or t
  misc_feature (818)..(818): n is a, c, g, or t
  misc_feature (825)..(825): n is a, c, g, or t
  misc_feature (844)..(844): n is a, c, g, or t
  misc_feature (870)..(870): n is a, c, g, or t
  misc_feature (897)..(897): n is a, c, g, or t
  misc_feature (926)..(926): n is a, c, g, or t
  misc_feature (928)..(928): n is a, c, g, or t
  misc_feature (941)..(941): n is a, c, g, or t
  misc_feature (943)..(943): n is a, c, g, or t
  misc_feature (949)..(951): n is a, c, g, or t
  misc_feature (953)..(955): n is a, c, g, or t
  misc_feature (959)..(960): n is a, c, g, or t
  misc_feature (962)..(963): n is a, c, g, or t
  misc_feature (965)..(967): n is a, c, g, or t
  misc_feature (969)..(969): n is a, c, g, or t
agaaattactatgagaggatcgcatcaccatcaccatcacggatcctatttaggtgacactatagaatcgtcgacccacgcgtccgcccacgcgtccggcaccccagcggcccctgcagcccctgcctccagcctccagcctcacctttgtgcccagactcgcatttggaagactccacctcccgcccaggcctgggctgttgggcggttggagattcaggttttaatccacacaagccccagtgaggggtgaagcatggcgcctggggcctgcctgagtttctggcctgggtgtcgtgctggtgtctgcctccgcgctgctgcatctggacgaaggctgccttctggtgggacgcgacacccggcagacagtggtgctgccttccaggccccgtggcctaggctcggagtggccaggcacggggcggtccaatcccccacccgctgtccccctatgggggcagaaaagcaataatgtccaggggcaggcaggggcccttgggagctgcagggctgggggttagggctgctccctggtgaatggagtcanatcctaggatctgtaccatggggaaccaggagtggccgggctgggtgccgcctcctggtccggcctcctccccaccaaactgtcctcaccctatggatgaggcaggaggaacatttggggccaaacctgcctgcctcccagccccgtgccttactagggcttccttccagctggacttacctcccgctggaccctgggcctggcctggccccactgggggctatgggctgggctcaccctctcctctgcgggggtgnagggccaccanccttggntgttacaatcttacaccgnaaagtattgggccccatggactttgntcaaggaagggtgggggtgggcatctnttggtactattgggggtgggggggccttntnaaaaagggaaggntnctaagnnncnnntaanncnntnnntnt

SEQ ID NO: 70 - DNA, 1233 bp, Homo Sapiens
  misc_feature (909)..(909): n is a, c, g, or t
  misc_feature (938)..(938): n is a, c, g, or t
  misc_feature (1006)..(1006): n is a, c, g, or t
  misc_feature (1009)..(1009): n is a, c, g, or t
  misc_feature (1027)..(1027): n is a, c, g, or t
  misc_feature (1029)..(1029): n is a, c, g, or t
  misc_feature (1039)..(1039): n is a, c, g, or t
  misc_feature (1052)..(1052): n is a, c, g, or t
  misc_feature (1057)..(1057): n is a, c, g, or t
  misc_feature (1059)..(1059): n is a, c, g, or t
  misc_feature (1068)..(1068): n is a, c, g, or t
  misc_feature (1073)..(1073): n is a, c, g, or t
  misc_feature (1086)..(1086): n is a, c, g, or t
  misc_feature (1089)..(1089): n is a, c, g, or t
  misc_feature (1095)..(1095): n is a, c, g, or t
  misc_feature (1126)..(1126): n is a, c, g, or t
  misc_feature (1129)..(1129): n is a, c, g, or t
  misc_feature (1132)..(1132): n is a, c, g, or t
  misc_feature (1137)..(1137): n is a, c, g, or t
  misc_feature (1139)..(1139): n is a, c, g, or t
  misc_feature (1142)..(1142): n is a, c, g, or t
  misc_feature (1144)..(1145): n is a, c, g, or t
  misc_feature (1148)..(1149): n is a, c, g, or t
  misc_feature (1155)..(1155): n is a, c, g, or t
  misc_feature (1162)..(1162): n is a, c, g, or t
  misc_feature (1164)..(1164): n is a, c, g, or t
  misc_feature (1174)..(1174): n is a, c, g, or t
  misc_feature (1177)..(1177): n is a, c, g, or t
  misc_feature (1191)..(1191): n is a, c, g, or t
  misc_feature (1198)..(1198): n is a, c, g, or t
  misc_feature (1204)..(1204): n is a, c, g, or t
  misc_feature (1208)..(1208): n is a, c, g, or t
  misc_feature (1220)..(1220): n is a, c, g, or t
  misc_feature (1222)..(1222): n is a, c, g, or t
  misc_feature (1224)..(1224): n is a, c, g, or t
agagagattactatgagaggatcgcatcaccatcaccatcacggatcctatttaggtgacactatagaatcgtcgacccacgcgtccgcccacgcgtccgcccacgcgtccgatcacaaggccttccaaaaagagttggggaagaggaccagcagtgtgcaggccctgaagcgctcagcccgagaactcatagaaggcagtcgggatgactcctcctgggtcaaggtccagatgcaggaattaagcacacgctgggagaccgtgtgtgcactttctatatcaaagcaaacacggttagaagcagccctgcgtcaggcagaggaattccactcggtggtacatgccctcttggagtggctggctgaggcggagcaaaccctgcgtttccatggtgtcctcccagatgatgaggatgctctccggactctcattgatcagcataaagaattcatgaagaaactggaagaaaagagagctgaactaaataaagccaccactatgggcgacaccgttttggctatctgccaccccgactccatcactaccattaagcactggataacaatcatccgggcgaggtttgaggaggtgctggcctgggcaaagcaacatcagcagagattagcaagtgctctggctgggcttattgccaaacaggaattgttggaagctttgctggcttggttgcaatgggctgaaactacacttactgataaggataaagaagccatcccccaggagatcgaagaggtgaaagcactcattgcagaacaccagaccttcatggaggaaatgaccagaaaacagcctgatgttgataaagtaacgaaaaacctataagaggagagctgctgatccttcctcattacaatcccatattccagtcttggataagggacgagcaggaanaaaacgctttccagcatcaagcttgtatnccctctgggtcacagacacaaattgaaaccaaaatcctagggtaaacttactggtgagcaaatggcancangtctggctcctggggttngnaaaaaggagnaactcatgatgcntggananactaaaganctganggaatttgctaanttngatttngaatcggggcaaaaaacttgcgagggatgantcnaanaattntnggngnnggnnttttcnggaaatngnaaaacccganggnaaaaaccggcggantttttgnggattnttcncaagttcccccncncnttggaaagg

SEQ ID NO: 71 - DNA, 1173 bp, Homo Sapiens
  misc_feature (891)..(891): n is a, c, g, or t
  misc_feature (906)..(906): n is a, c, g, or t
  misc_feature (919)..(919): n is a, c, g, or t
  misc_feature (960)..(960): n is a, c, g, or t
  misc_feature (969)..(969): n is a, c, g, or t
  misc_feature (990)..(990): n is a, c, g, or t
  misc_feature (993)..(993): n is a, c, g, or t
  misc_feature (1016)..(1016): n is a, c, g, or t
  misc_feature (1019)..(1019): n is a, c, g, or t
  misc_feature (1035)..(1035): n is a, c, g, or t
  misc_feature (1042)..(1042): n is a, c, g, or t
  misc_feature (1068)..(1068): n is a, c, g, or t
  misc_feature (1070)..(1071): n is a, c, g, or t
  misc_feature (1075)..(1075): n is a, c, g, or t
  misc_feature (1081)..(1081): n is a, c, g, or t
  misc_feature (1089)..(1089): n is a, c, g, or t
  misc_feature (1102)..(1102): n is a, c, g, or t
  misc_feature (1104)..(1104): n is a, c, g, or t
  misc_feature (1108)..(1108): n is a, c, g, or t
  misc_feature (1112)..(1112): n is a, c, g, or t
  misc_feature (1121)..(1121): n is a, c, g, or t
  misc_feature (1140)..(1140): n is a, c, g, or t
  misc_feature (1146)..(1146): n is a, c, g, or t
  misc_feature (1150)..(1150): n is a, c, g, or t
  misc_feature (1154)..(1155): n is a, c, g, or t
  misc_feature (1159)..(1159): n is a, c, g, or t
  misc_feature (1164)..(1164): n is a, c, g, or t
tagagagattactatgagaggatcgcatcaccatcaccatcacggatcctatttaggtgacactatagaatcgtcgacccacgcgtccgcccacgcgtccgcacaggtgacacaaacaaagtttctccccaatgctccgaaagctctcattgttgaaccttcccgggagttagctgaacaaactttgaataacatcaagcagtttaagaaatacattgataatcctaaattaagggagcttctgataattggaggtgttgcagcccgggatcagctctctgttttggaaaatggagtagatatagttgtaggtactccgggaagactagatgacttggtgtcaactggaaagctgaacttatctcaagttagattcctggtcctggatgaagctgatgggcttctttctcaaggttattctgattttataaataggatgcacaatcagattcctcaggttacctctgatggaaaaagacttcaggtgattgtttgctctgccactttgcattctttcgatgtaaagaaactgtccgagaagataatgcattttcctacatgggttgacttaaaaggagaagactctgttccagatactgtacaccatgttgttgtcccagtaaatcccaaaactgacagactctgggaaaggcttggaaagagccacattagaactgatgatgtacatgcaaaagataacacaagacctggtgctaatagtccagagatgtggtctgaagctattaaaatcctgaaagggggagtatgctgtccgggcaatcaaggaacataagatggatcaagcaattatcttctgtagaaccaaaattgactgtgataacttggagcagtactttatacaacaggagggaggacctgataaaaaggacnccagttctccagggnttggcctctgggngacagaaagcctcatgaaaaaagcaaacttgggaaagattnaaaaagganatgtaagattcttgatttgcncanatgtaactgctaaagaattgaanccncggggttcctaaggtnataatgncccccggccccaagaaaaccaaaccncnnaccncaatgncaaaaaanaaaaacttaaagnangggnctgncaattcccngggggaaaaaaaaaaaaangttggnaccntgtnntacnccccnggaaaaggg

SEQ ID NO: 72 - DNA, 1156 bp, Homo Sapiens
  misc_feature (1)..(1): n is a, c, g, or t
  misc_feature (862)..(862): n is a, c, g, or t
  misc_feature (864)..(864): n is a, c, g, or t
  misc_feature (894)..(894): n is a, c, g, or t
  misc_feature (896)..(896): n is a, c, g, or t
  misc_feature (898)..(898): n is a, c, g, or t
  misc_feature (962)..(962): n is a, c, g, or t
  misc_feature (970)..(970): n is a, c, g, or t
  misc_feature (973)..(973): n is a, c, g, or t
  misc_feature (982)..(982): n is a, c, g, or t
  misc_feature (984)..(984): n is a, c, g, or t
  misc_feature (991)..(991): n is a, c, g, or t
  misc_feature (995)..(995): n is a, c, g, or t
  misc_feature (999)..(999): n is a, c, g, or t
  misc_feature (1013)..(1013): n is a, c, g, or t
  misc_feature (1017)..(1017): n is a, c, g, or t
  misc_feature (1020)..(1020): n is a, c, g, or t
  misc_feature (1042)..(1042): n is a, c, g, or t
  misc_feature (1044)..(1044): n is a, c, g, or t
  misc_feature (1050)..(1050): n is a, c, g, or t
  misc_feature (1052)..(1052): n is a, c, g, or t
  misc_feature (1054)..(1054): n is a, c, g, or t
  misc_feature (1063)..(1063): n is a, c, g, or t
  misc_feature (1074)..(1074): n is a, c, g, or t
  misc_feature (1084)..(1084): n is a, c, g, or t
  misc_feature (1091)..(1091): n is a, c, g, or t
  misc_feature (1095)..(1095): n is a, c, g, or t
  misc_feature (1098)..(1098): n is a, c, g, or t
  misc_feature (1103)..(1103): n is a, c, g, or t
  misc_feature (1112)..(1113): n is a, c, g, or t
  misc_feature (1142)..(1142): n is a, c, g, or t
  misc_feature (1144)..(1144): n is a, c, g, or t
  misc_feature (1147)..(1148): n is a, c, g, or t
  misc_feature (1152)..(1152): n is a, c, g, or t
  misc_feature (1155)..(1155): n is a, c, g, or t
naattagagaaaattactatgagaggatcgcatcaccatcaccatcacggatcctatttaggtgacactatagaatcgtcgacccacgcgtccggcaggatggagaggagacgcatcacctccgctgctcgccgctcctacgtctcctcaggggagatgatggtggggggcctggctcctggccgccgtctgggtcctggcacccgcctctccctggctcgaatgccccctccactcccgacccgggtggatttctccctggctggggcactcaatgctggcttcaaggagacccgggccagtgagcgggcagagatgatggagctcaatgaccgctttgccagctacatcgagaaggttcgcttcctggaacagcaaaacaaggcgctggctgctgagctgaaccagctgcgggccaaggagcccaccaagctggcagacgtctaccaggctgagctgcgagagctgcggctgcggctcgatcaactcaccgccaacagcgcccggctggaggttgagagggacaatctggcacaggacctggccactgtgaggcagaagctccaggatgaaaccaacctgaggctggaagccgagaacaacctggctgcctatagacaggaagcagatgaagccaccctggcccgtctggatctggagaggaagattgagtcgctggaggaggagatccggttcttgaggaagatccacgaggaggaggttcgggaactccaggagcagctggcccgacagcaggtccatgtggagcttgacgtggccaagccagacctcaccgcagccctgaaagagatccgcacgcagtatgaggcaatggcgtccagcaacatgcatgaagccgaanantggtaccgcttccaagtttgcaaacctgananangctgctgcccgcaacgcggaactgctcccccaggccaagcacgaaaccaacgactaccggcgcnagttgcantcnttgacctgnanctggaantctntgcncgggaacaaacaantccntgnaaaaggcaaatccccaaacagnanaaacgncncntgcgggaangcggccaattnttcaagaagncccttgncccngcntgaanaaaaagggnnaaaacctcaaggaaaaaaatggccccccnanttnnaagnaana

SEQ ID NO: 73 - DNA, 917 bp, Homo Sapiens
  misc_feature (1)..(1): n is a, c, g, or t
  misc_feature (890)..(890): n is a, c, g, or t
  misc_feature (895)..(917): n is a, c, g, or t
nttagagaaattactatgagaggatcgcatcaccatcaccatcacggatcctatttaggtgacactatagaatcgtcgacccacgcgtccggcaaggccaaggcgccgcagcaggaggaggggcccaagggtgtcgatgagcagagcgacagtagtgaggagagtgaggaggagaagccgcctgaggaggacaaggaggaggaggaggagaagaaggcacccaccccgcaggagaagaagcgcaggaaagacagcagcgaggagtcggacagctcagaggagagcgacattgacagcgaggcctcctcagccctcttcatggcgaagaagaagacgccacccaagagagagcggaagccgtcgggagggagctcaaggggcaacagccgcccaggcacgcccagcgcagagggtggcagcacctcctccaccctgcgggcggctgccagcaaactcgagcaagggaagcgggtgagcgagatgcctgcagccaagcggttgcggctggacacgggaccccagagcctgtctgggaagtcgacaccccagccaccatcaggcaagacaacacccaacagcggcgacgtgcaggtgactgaggatgccgtgcgccgctacctgacacggaagcccatgaccactaaggacctgctgaaaaagttccagaccaagaagacagggctgagcagcgagcagacagtgaacgtgttggcccagatcctcaagcgactcaaccccgagcgcaagatgatcaacgacaaaatgcacttctccctcaaggagtgaggcttggtccaatacatggctctgccccccagaacttaaggctctcactgccccttcgccatcctagagtgaggctctgtccaatacatggctctgccctccanaaaannnnnnnnnnnnnnnnnnnnnnn

SEQ ID NO: 74 - DNA, 1122 bp, Homo Sapiens
  misc_feature (2)..(2): n is a, c, g, or t
  misc_feature (935)..(935): n is a, c, g, or t
  misc_feature (977)..(978): n is a, c, g, or t
  misc_feature (992)..(992): n is a, c, g, or t
  misc_feature (997)..(997): n is a, c, g, or t
  misc_feature (1000)..(1000): n is a, c, g, or t
  misc_feature (1004)..(1004): n is a, c, g, or t
  misc_feature (1009)..(1009): n is a, c, g, or t
  misc_feature (1015)..(1015): n is a, c, g, or t
  misc_feature (1019)..(1019): n is a, c, g, or t
  misc_feature (1021)..(1021): n is a, c, g, or t
  misc_feature (1023)..(1023): n is a, c, g, or t
  misc_feature (1042)..(1042): n is a, c, g, or t
  misc_feature (1049)..(1049): n is a, c, g, or t
  misc_feature (1052)..(1052): n is a, c, g, or t
  misc_feature (1061)..(1061): n is a, c, g, or t
  misc_feature (1065)..(1065): n is a, c, g, or t
  misc_feature (1072)..(1072): n is a, c, g, or t
  misc_feature (1074)..(1074): n is a, c, g, or t
  misc_feature (1078)..(1078): n is a, c, g, or t
  misc_feature (1082)..(1082): n is a, c, g, or t
  misc_feature (1084)..(1084): n is a, c, g, or t
  misc_feature (1100)..(1100): n is a, c, g, or t
  misc_feature (1102)..(1102): n is a, c, g, or t
  misc_feature (1105)..(1105): n is a, c, g, or t
  misc_feature (1107)..(1107): n is a, c, g, or t
  misc_feature (1112)..(1112): n is a, c, g, or t
  misc_feature (1118)..(1118): n is a, c, g, or t
antagagaaattactatgagaggatcgcatcaccatcaccatcacggatcctatttaggtgacactatagaatcgtcgacccacgcgtccgcgagagtgactcccgttgtcccaaggcttcccagagcgaacctgtgcggctgcaggcaccggcgcgtcgagtttccggcgtccggaaggaccgagctcttctcgcggatccagtgttccgtttccagcccccaatctcagagcggagccgacagagagcagggaaccggcatggccaaagccgcggcgatcggcatcgacctgggcaccacctactcctgcgtgggggtgttccaacacggcaaggtggagatcatcgccaacgaccagggcaaccgcaccacccccagctacgtggccttcacggacaccgagcggctcatcggggatgcggccaagaaccaggtggcgctgaacccgcagaacaccgtgtttgacgcgaagcggctgatcggccgcaagttcggcgacccggtggtgcagtcggacatgaagcactggcctttccaggtgatcaacgacggagacaagcccaaggtgcaggtgagctacaagggggagaccaaggcattctaccccgaggagatctcgtccatggtgctgaccaagatgaaggagatcgccgaggcgtacctgggctacccggtgaccaacgcggtgatcaccgtgccggcctacttcaacgactcgcagcgccaggccaccaaggatgcgggtgtgatcgcggggctcaacgtgctgcggatcatcaacgagcccacggccgccgccatcgcctacggcctggacagaacgggcaagggggagcgcaacgtgctcatctttgacctgggcgggggcaccttcgacgtgtccatcctgacgatcgacgacggcatcttcgaggtgaagccacggccgggganacccacctgggtgggaggacttgacaaaggctgggaacactnngtggagattcaganaaacncanaagnaatcnccaaanaacnancntgagcgctgccccccctgnaaaggcnaangacctgtcntcanaccagcnanctgnaatnantcctgttgaggctcantntancntctcncagggnagtt

SEQ ID NO: 75 - DNA, 1297 bp, Homo Sapiens
  misc_feature (915)..(915): n is a, c, g, or t
  misc_feature (919)..(919): n is a, c, g, or t
  misc_feature (939)..(940): n is a, c, g, or t
  misc_feature (956)..(956): n is a, c, g, or t
  misc_feature (961)..(961): n is a, c, g, or t
  misc_feature (990)..(990): n is a, c, g, or t
  misc_feature (999)..(999): n is a, c, g, or t
  misc_feature (1001)..(1001): n is a, c, g, or t
  misc_feature (1027)..(1027): n is a, c, g, or t
  misc_feature (1055)..(1055): n is a, c, g, or t
  misc_feature (1064)..(1064): n is a, c, g, or t
  misc_feature (1074)..(1074): n is a, c, g, or t
  misc_feature (1083)..(1083): n is a, c, g, or t
  misc_feature (1091)..(1091): n is a, c, g, or t
  misc_feature (1105)..(1105): n is a, c, g, or t
  misc_feature (1123)..(1123): n is a, c, g, or t
  misc_feature (1128)..(1128): n is a, c, g, or t
  misc_feature (1133)..(1133): n is a, c, g, or t
  misc_feature (1145)..(1145): n is a, c, g, or t
  misc_feature (1149)..(1149): n is a, c, g, or t
  misc_feature (1153)..(1153): n is a, c, g, or t
  misc_feature (1157)..(1157): n is a, c, g, or t
  misc_feature (1164)..(1164): n is a, c, g, or t
  misc_feature (1176)..(1176): n is a, c, g, or t
  misc_feature (1184)..(1184): n is a, c, g, or t
  misc_feature (1186)..(1186): n is a, c, g, or t
  misc_feature (1203)..(1203): n is a, c, g, or t
  misc_feature (1220)..(1220): n is a, c, g, or t
  misc_feature (1235)..(1235): n is a, c, g, or t
  misc_feature (1237)..(1238): n is a, c, g, or t
  misc_feature (1252)..(1252): n is a, c, g, or t
  misc_feature (1255)..(1255): n is a, c, g, or t
  misc_feature (1257)..(1257): n is a, c, g, or t
  misc_feature (1261)..(1261): n is a, c, g, or t
  misc_feature (1265)..(1265): n is a, c, g, or t
  misc_feature (1270)..(1271): n is a, c, g, or t
  misc_feature (1284)..(1284): n is a, c, g, or t
  misc_feature (1286)..(1286): n is a, c, g, or t
  misc_feature (1288)..(1288): n is a, c, g, or t
  misc_feature (1290)..(1290): n is a, c, g, or t
  misc_feature (1294)..(1294): n is a, c, g, or t
tagagaaattactatgagaggatcgcatcaccatcaccatcacggatcctatttaggtgacactatagaatcgtcgacccacgcgtccgcctcggtacccgcgagcggggaggaggcaggaaagaaggacgcggcgtctggggagcacccaggcagcaagacggggcccgggctttcgacagtggggagtgtgacgcgcttgggaaaggcaggagcgccagcggtcgggctgctcttggctaacgagaggagtccgaggcggcggcgaggggcgaacgacccgacgcaagatggcgatgtttgaagatactgtggaggagcgtgtcatcaatgaagaatataaaatctggaagaagaatacaccgtttctatatgacctggttatgacccatgctcttcagtggcccagtcttaccgttcagtggcttcctgaagtgactaaacctgaaggaaaagattatgcccttcattggctagtgctggggactcatacgtctgatgagcagaatcatctggtggttgctcgagtacatattcccaatgatgatgcacagtttgatgcttcccattgtgacagtgacaagggtgaatttggtggctttggttctgtaacaggaaaaattgaatgtgaaattaaaatcaatcacgaaggagaagtaaaccgtgctcgttacatgccgcagaatcctcacatcattgctacaaaaacaccatcttctgatgtgttggtttttgactatacaaaacaccctgctaaaccagacccaagtggagaatgtaatcctgatctcagattaagaggtcaccagaaggaaggctatggtctctcctggaattcaaatttgagtggacatctcctaagtgcatctgatgaccatactgtttgtctgtgggatataaacgcaggaccaaaanaagncaaaattgtggatgctaaannccatctttactggccnctcanctttttgtaaaagaatgtggcctggcacntgctgcacnantcatttgtttggaatctgttgctgangatcaaaaacttatgatatgggaacccnaggtccaanaccccctccnaaccccaantcctttgntggaatgccccccnctgcccaaaatcaaatgnccttntattnaatccccaaagngaantttnttcnacccccngctctccggganaaaacctnanctttttggaatccgccnaacttaaaattaaaacncccaaccttcaaacncnnaaaaaaaaattttnccngncccntggntcccnnaaaaaaaaaaaantntngnttcnagg

SEQ ID NO: 76 - DNA, 1179 bp, Homo Sapiens
  misc_feature (902)..(902): n is a, c, g, or t
  misc_feature (908)..(908): n is a, c, g, or t
  misc_feature (928)..(928): n is a, c, g, or t
  misc_feature (935)..(935): n is a, c, g, or t
  misc_feature (957)..(957): n is a, c, g, or t
  misc_feature (967)..(967): n is a, c, g, or t
  misc_feature (980)..(980): n is a, c, g, or t
  misc_feature (982)..(982): n is a, c, g, or t
  misc_feature (986)..(986): n is a, c, g, or t
  misc_feature (990)..(990): n is a, c, g, or t
  misc_feature (993)..(993): n is a, c, g, or t
  misc_feature (1025)..(1025): n is a, c, g, or t
  misc_feature (1036)..(1036): n is a, c, g, or t
  misc_feature (1040)..(1040): n is a, c, g, or t
  misc_feature (1050)..(1050): n is a, c, g, or t
  misc_feature (1065)..(1065): n is a, c, g, or t
  misc_feature (1069)..(1069): n is a, c, g, or t
  misc_feature (1072)..(1072): n is a, c, g, or t
  misc_feature (1078)..(1078): n is a, c, g, or t
  misc_feature (1088)..(1088): n is a, c, g, or t
  misc_feature (1104)..(1104): n is a, c, g, or t
  misc_feature (1114)..(1114): n is a, c, g, or t
  misc_feature (1116)..(1117): n is a, c, g, or t
  misc_feature (1121)..(1121): n is a, c, g, or t
  misc_feature (1127)..(1127): n is a, c, g, or t
  misc_feature (1129)..(1129): n is a, c, g, or t
  misc_feature (1131)..(1131): n is a, c, g, or t
  misc_feature (1133)..(1133): n is a, c, g, or t
  misc_feature (1139)..(1140): n is a, c, g, or t
  misc_feature (1143)..(1143): n is a, c, g, or t
  misc_feature (1157)..(1157): n is a, c, g, or t
  misc_feature (1169)..(1169): n is a, c, g, or t
  misc_feature (1171)..(1171): n is a, c, g, or t
  misc_feature (1178)..(1178): n is a, c, g, or t
tagagaaattactatgagaggatcgcatcaccatcaccatcacggatcctatttaggtgacactatagaatcgtcgacccacgcgtccgaccggatgcaccctgcactcagcgccttcccatccaacatcttctacgagggctccctccagaatggtgtcactgcagcggatcgtgtgaagaagggatttgacttccagtggccccaacccgataaaccgatgttcttctacgtgacccagggccaagaggagattgccagctcgggcacctcctacctgaacaggaccgaggctgcgaacgtggagaagatcaccacgaagttgctgaaggcaggcgccaagccggaccagattggcatcatcacgccctacgagggccagcgctcctacctggtgcagtacatgcagttcagcggctccctgcacaccaagctctaccaggaggtggagatcgccagtgtggacgcctttcagggacgcgagaaggacttcatcatcctgtcctgtgtgcgggccaacgagcaccaaggcattggctttttaaatgaccccaggcgtctgaacgtggccctgaccagagcaaggtatggcgtcatcattgtgggcaacccgaaggcactatcaaagcagccgctctggaaccacctgctgaactactataaggagcagaaggtgctggtggaggggccgctcaacaacctgcgtgagagcctcatgcagttcagcaagccacggaagctggtcaacactatcaacccgggagcccgcttcatgaccacagccatgtatgatgcccgggaggccatcatccccaggctccgtctatgatcggagcagccagggccggccttccagcatgtacttccagaaccatgaccagattggcatgatcagtgccggnccctanccacgtgggctgccatgaanattcccnatcccctttaacctggtcatgncaacccatgnccaccgcctggcntntttngganaanccaacgggcctgctgcagggcgaggcaccccnaaaaggaaaantggntctgggggancccaaaaaaaaaccntttnggntttctngaaccaaccnaataacctcccaaaanccaaaccagncnngaantggggncnanancccttnnttnagggggcctgaagnaggtttaatttncntgaacanc

SEQ ID NO: 77 - DNA, 1290 bp, Homo Sapiens
  misc_feature (1)..(2): n is a, c, g, or t
  misc_feature (4)..(4): n is a, c, g, or t
  misc_feature (914)..(914): n is a, c, g, or t
  misc_feature (938)..(938): n is a, c, g, or t
  misc_feature (944)..(944): n is a, c, g, or t
  misc_feature (967)..(967): n is a, c, g, or t
  misc_feature (1008)..(1008): n is a, c, g, or t
  misc_feature (1022)..(1022): n is a, c, g, or t
  misc_feature (1038)..(1038): n is a, c, g, or t
  misc_feature (1043)..(1043): n is a, c, g, or t
  misc_feature (1049)..(1049): n is a, c, g, or t
  misc_feature (1058)..(1058): n is a, c, g, or t
  misc_feature (1066)..(1066): n is a, c, g, or t
  misc_feature (1072)..(1072): n is a, c, g, or t
  misc_feature (1074)..(1074): n is a, c, g, or t
  misc_feature (1080)..(1080): n is a, c, g, or t
  misc_feature (1094)..(1094): n is a, c, g, or t
  misc_feature (1100)..(1100): n is a, c, g, or t
  misc_feature (1120)..(1120): n is a, c, g, or t
  misc_feature (1140)..(1140): n is a, c, g, or t
  misc_feature (1142)..(1143): n is a, c, g, or t
  misc_feature (1152)..(1152): n is a, c, g, or t
  misc_feature (1157)..(1157): n is a, c, g, or t
  misc_feature (1167)..(1167): n is a, c, g, or t
  misc_feature (1183)..(1183): n is a, c, g, or t
  misc_feature (1187)..(1187): n is a, c, g, or t
  misc_feature (1190)..(1190): n is a, c, g, or t
  misc_feature (1193)..(1193): n is a, c, g, or t
  misc_feature (1197)..(1197): n is a, c, g, or t
  misc_feature (1207)..(1207): n is a, c, g, or t
  misc_feature (1211)..(1211): n is a, c, g, or t
  misc_feature (1213)..(1213): n is a, c, g, or t
  misc_feature (1221)..(1221): n is a, c, g, or t
  misc_feature (1225)..(1225): n is a, c, g, or t
  misc_feature (1243)..(1243): n is a, c, g, or t
  misc_feature (1248)..(1249): n is a, c, g, or t
  misc_feature (1251)..(1251): n is a, c, g, or t
  misc_feature (1257)..(1257): n is a, c, g, or t
  misc_feature (1262)..(1262): n is a, c, g, or t
  misc_feature (1281)..(1281): n is a, c, g, or t
  misc_feature (1283)..(1284): n is a, c, g, or t
nnantagagaaattactatgagaggatcgcatcaccatcaccatcacggatcctatttaggtgacactatagaatcgtcgacccacgcgtccgggcccgaggggctgggagagtgcgggcgaggccgggagggctgggaccaagaatcgccttcagccctgtctggtgcatccttggcagaaagtgaggaggaaaacacccccattgttctttggcatggacacaagttcagtgggaggattagaattgactgatcagactcctgttttattagggagtacggccatggcaactagtctcacgaatgtaggaaactcatttagtggtccagctaatcctttagtgtctagatctaataagtttcagaactcgtcagtggaagatgatgatgatgttgtttttatcgaacctgtacaacctcccccaccttctgtaccagtggtagctgatcaaagaaccataacatttacatcatcaaaaaaatgaagaactacaaggaaatgattccaaaattactccttcctcaaaagagttggcatctcagaagggaagtgtaagtgagacaattgtcattgatgatgaagaggacatggaaacaaatcaagggcaagagaaaaattcctccaattttattgaacgaagacctcctgagactaaaaacagaaccaatgatgtggatttctccacttccagtttttcaagaagtaagaccaagactggagtaggaccttttaatcctggtagaatgaatgtggcaggagacgtttttcagaatggagaatctgcaactcatcataatcctgattcttggatctcccagtcagcttcatttccccgtaatcagaaacaaccaggggtggactctttatcaccagtggcctcacttcctaacagatttttccagccgtctgtcnaacagcagcctactaaaccagttnaagtcncttgtgcaaactgcaaaaaaccnttacagaagggccagacagcttatcacgaaaggatcgctcncctcttttgttctncactggctttctcctnctccnaaagcntgctcaaanaactctgngtttgngnaaaagnaggttacctttcanaaaatnactaagtgaatttggagtgnaaatttaaaaaaggaacaantnnaaactttgnaactnccttcagccnggggcatggaaaaagnttcngtnggnggcntggattaatnaaangncctaaaanattngcggaccccctggacctngtttnnanaacccnttttncggtaaggaaaaatttttntnnccaaaa

SEQ ID NO: 78 - DNA, 1179 bp, Homo Sapiens
  misc_feature (314)..(314): n is a, c, g, or t
  misc_feature (805)..(805): n is a, c, g, or t
  misc_feature (819)..(819): n is a, c, g, or t
  misc_feature (884)..(884): n is a, c, g, or t
  misc_feature (892)..(892): n is a, c, g, or t
  misc_feature (904)..(904): n is a, c, g, or t
  misc_feature (961)..(961): n is a, c, g, or t
  misc_feature (975)..(975): n is a, c, g, or t
  misc_feature (980)..(980): n is a, c, g, or t
  misc_feature (996)..(996): n is a, c, g, or t
  misc_feature (1008)..(1008): n is a, c, g, or t
  misc_feature (1017)..(1017): n is a, c, g, or t
  misc_feature (1019)..(1019): n is a, c, g, or t
  misc_feature (1024)..(1024): n is a, c, g, or t
  misc_feature (1048)..(1048): n is a, c, g, or t
  misc_feature (1079)..(1080): n is a, c, g, or t
  misc_feature (1088)..(1088): n is a, c, g, or t
  misc_feature (1101)..(1101): n is a, c, g, or t
  misc_feature (1103)..(1103): n is a, c, g, or t
  misc_feature (1108)..(1108): n is a, c, g, or t
  misc_feature (1110)..(1110): n is a, c, g, or t
  misc_feature (1119)..(1119): n is a, c, g, or t
  misc_feature (1131)..(1131): n is a, c, g, or t
  misc_feature (1133)..(1133): n is a, c, g, or t
  misc_feature (1142)..(1142): n is a, c, g, or t
  misc_feature (1145)..(1145): n is a, c, g, or t
  misc_feature (1166)..(1166): n is a, c, g, or t
  misc_feature (1176)..(1176): n is a, c, g, or t
tagagaaattactatgagaggatcgcatcaccatcaccatcacggatcctatttaggtgacactatagaatcgtcgacccacgcgtccgctgtgtttaactttaccatccatgagatccactgtcaaaggaacattggtatgtgtcctacctgtaaggaaccatttcccaaatctgacatggagactcacatggctgcagaacactgtcaggtgacctgcaaatgtaacaagaagttggagaagaggctgttaaagaagcatgaggagactgagtgccctttgcggcttgctgtctgccagcactgtgatttanaactttccattctcaaactgaaggaacatgaagattattgtggtgcccggacggaactatgtggcaactgtggtcgcaatgtccttgtgaaagatctgaagactcaccctgaagtttgtgggagagagggggaggaaaagagaaatgaggttgccatacctcctaatgcatatgatgaatcttggggtcaggatggaatctggattgcatcccaactcctcagacaaattgaggctctggacccacccatgaggctgccgcgaaggcccctgagagcctttgaatcagatgttttccacaatagaactaccaaccaaaggaacattacagcccaggtttcaattcagaataatctgtttgaagaacaagagaggcaggaaaggaatagaggccaacagccccccaaagagggtggtgaagagagtgcaaacttggacttcatgttggccctaagtctgcaaaatgaaggccaagcctccagtgtggcagancaggacttctgganggccgtatgtgaggccgaccagtctcatggcggtcccaggtctctcagtgacataaagggtgcanctgacganatcatgttgccntgtgaaattttgtgaggagctctacccaaaggaactgctgattgaccatcaaacaanctgtaaccccttcncgggncttaccttcccccaanactggcagctcntccccccananggggngaagaaacctgatgtcttcttccnaaaattcttggcaacaggctgcaagtaaccnnttaaaatnttttaaggggccngnaacantncccccctgnggaagaaaaccncnttatccccntgnaattctggggggaaaacctgnaaaaaaaagntct

SEQ ID NO: 79 - DNA, 1041 bp, Homo Sapiens
  misc_feature (805)..(805): n is a, c, g, or t
  misc_feature (871)..(871): n is a, c, g, or t
  misc_feature (925)..(925): n is a, c, g, or t
  misc_feature (931)..(931): n is a, c, g, or t
  misc_feature (941)..(941): n is a, c, g, or t
  misc_feature (951)..(951): n is a, c, g, or t
  misc_feature (956)..(956): n is a, c, g, or t
  misc_feature (961)..(961): n is a, c, g, or t
  misc_feature (977)..(977): n is a, c, g, or t
  misc_feature (987)..(987): n is a, c, g, or t
  misc_feature (989)..(990): n is a, c, g, or t
  misc_feature (994)..(995): n is a, c, g, or t
  misc_feature (1005)..(1005): n is a, c, g, or t
  misc_feature (1008)..(1008): n is a, c, g, or t
  misc_feature (1018)..(1018): n is a, c, g, or t
  misc_feature (1026)..(1026): n is a, c, g, or t
  misc_feature (1028)..(1028): n is a, c, g, or t
  misc_feature (1036)..(1039): n is a, c, g, or t
attagagaaattactatgagaggatcgcatcaccatcaccatcacggatcctatttaggtgacactatagaatcgtcgacccacgcgtccgcccacgcgtccggaagtccaaggatcgctcaaaagataaaggggccaccaaggagtcgagtgagaaggatcgcggccgggacaaaacccgaaagaggcgcagcgcttccagtggtagcagcagtaccaggtctcggtccagctcgacttccagctcaggctccagcaccagcactggctcaagcagtggctccagctcttcctcagcatccagccgctcaggaagctccagcacctcccgcagctccagctctagcagctcttctggctctccaagtccttctcggcgcagacacgacaacaggaggcgctcccgctccaaatccaaaccacctaaaagagatgaaaaggagaggaaaaggcggagcccatctcctaagcccaccaaagtgcacattgggagactcacccggaatgtgacaaaggatcacatcatggagatattttccacctatgggaaaattaaaatgattgacatgcccgtggaaaggatgcatccccatctgtccaaaggctatgcgtacgtagagtttgagaatccagatgaagccgagaaggcgctgaagcacatggatggaggacaaattgatggccaggagatcactgccaccgccgtgctggccccctggcctaggccaccccccaggagattcagccctcccaggagaatgttgccaccaccgcctatgtggcgcaggtctcccccacggatgangagaaggtcccgctccccgaggcgcaggtcccccgtgcgccggaaatcacggtccccgggccgccnccgccacaggagccgctccagctccaactcctcccgataaacaggccactgaanctctcncccctgtaanttataccccncccanctcantttttgtcactttttntagccaaggnannaccnntaggaaagcnaanccttgaactnttggcagnanttgcaggnnnnag

SEQ ID NO: 80 - DNA, 887 bp, Homo Sapiens
  misc_feature (882)..(882): n is a, c, g, or t
agagaaattactatgagaggatcgcatcaccatcaccatcacggatcctatttaggtgacactatagaatcgtcgacccacgcgtccgcccgctcaccttccccttcccacaggttctacaagctgcacgagcggaggtgtgagcccattgccatgacagtgcctcgaaagtcggacctgttccaggaggacctgtacccacccaccgcagggcccgaccctgccctcacggctgaggagtggctggggggtcgggatgctgggcccctcctcatctccctcaaggatggctacgtacccccaaagagccgggagctgagggtcaaccggggcctggacaccgggcgcaggagggcagcaccagaggccagtggcactcccagctcggtgagagggctgggaagccagggaataaaactgggagggtggggtggggctggtgtttggggcacctcaaactcacaacattgggaatctttgtgggtccgggaatggtaatcctgaggcctcagaacacaggtttcagattgataggcctgcaggtctccaggcagcaaccagctgagcgactaaagggcccaaggccagggctctagggatggggctcagcagaggctggggtaaggggagccagggaggagctgggcctaatgcagcaccgggtccccaggatgccgtgtctcggctggaggaggagatgcggaagctccaggccacggtgcaggagctccagaagcgcttggacaggctggaggagacagtccaggccaagtagagccccgcagggcctccagcagggtcagccattcacacccatccactcacctcccattcccagccacatggcagagaaaaaaatcataataaaatggctttattttnctggt

SEQ ID NO: 81 - DNA, 1274 bp, Homo Sapiens
  misc_feature (922)..(922): n is a, c, g, or t
  misc_feature (924)..(924): n is a, c, g, or t
  misc_feature (927)..(927): n is a, c, g, or t
  misc_feature (932)..(932): n is a, c, g, or t
  misc_feature (967)..(967): n is a, c, g, or t
  misc_feature (974)..(974): n is a, c, g, or t
  misc_feature (981)..(981): n is a, c, g, or t
  misc_feature (990)..(990): n is a, c, g, or t
  misc_feature (998)..(998): n is a, c, g, or t
  misc_feature (1000)..(1000): n is a, c, g, or t
  misc_feature (1013)..(1013): n is a, c, g, or t
  misc_feature (1022)..(1022): n is a, c, g, or t
  misc_feature (1035)..(1035): n is a, c, g, or t
  misc_feature (1039)..(1039): n is a, c, g, or t
  misc_feature (1044)..(1044): n is a, c, g, or t
  misc_feature (1051)..(1051): n is a, c, g, or t
  misc_feature (1054)..(1054): n is a, c, g, or t
  misc_feature (1064)..(1065): n is a, c, g, or t
  misc_feature (1081)..(1081): n is a, c, g, or t
  misc_feature (1102)..(1102): n is a, c, g, or t
  misc_feature (1126)..(1126): n is a, c, g, or t
  misc_feature (1130)..(1130): n is a, c, g, or t
  misc_feature (1136)..(1136): n is a, c, g, or t
  misc_feature (1139)..(1142): n is a, c, g, or t
  misc_feature (1147)..(1147): n is a, c, g, or t
  misc_feature (1151)..(1151): n is a, c, g, or t
  misc_feature (1154)..(1154): n is a, c, g, or t
  misc_feature (1168)..(1168): n is a, c, g, or t
  misc_feature (1170)..(1170): n is a, c, g, or t
  misc_feature (1177)..(1178): n is a, c, g, or t
  misc_feature (1184)..(1184): n is a, c, g, or t
  misc_feature (1189)..(1189): n is a, c, g, or t
  misc_feature (1196)..(1196): n is a, c, g, or t
  misc_feature (1200)..(1200): n is a, c, g, or t
  misc_feature (1202)..(1202): n is a, c, g, or t
  misc_feature (1211)..(1212): n is a, c, g, or t
  misc_feature (1228)..(1228): n is a, c, g, or t
  misc_feature (1232)..(1232): n is a, c, g, or t
  misc_feature (1244)..(1244): n is a, c, g, or t
  misc_feature (1248)..(1248): n is a, c, g, or t
  misc_feature (1254)..(1255): n is a, c, g, or t
  misc_feature (1268)..(1268): n is a, c, g, or t
  misc_feature (1271)..(1271): n is a, c, g, or t
tagagaaattactatgagaggatcgcatcaccatcaccatcacggatcctatttaggtgacactatagaatcgtcgacccacgcgtccggccgtggaggcgccacgtcccttgcggcggcgggagagaaatcgcttggacttcggggcggcctcggacggccatggcctttaccctgtactcactgctgcaggcagccctgctctgcgtcaacgccatcgcagtgctgcacgaggagcgattcctcaagaacattggctggggaacagaccagggaattggtggatttggagaagagccgggaattaaatcacagctaatgaaccttattcgatctgtaagaaccgtgatgagagtgccattgataatagtaaactcaattgcaattgtgttacttttattatttggatgaatatcagtggagaaaatggagactcagaagaggacatgccagtagaagttattactttggtcattattggaatatttatatcttagctggctgaccttgcacttgtcaaaaatgtaaagctgaaaataaaaccagggtttctatttatctgtttttttttttaatgttgcacttgtagtttcattacaaaagatcagatcatgaaaggcagtaactctccaggactggaatatctgattgctcagtgttaatagtagttcatgctgtggtgagattgttaaaagggtgcaagactgttgcttctctttttttagatatttttctatctctcacttctcagggatgaaattctttttcaaagttttgaagttccttgcaacttagccatgatgtgagtggttatccctagataaaattaaaaggatttttaaaaagtaattactgcacataaaatgataaataggtaatttgaataattttattttaagctccttggttaattattttgtcnantgnctcanctataaattcaaatttatacatactattgagtatnatattcnctgattncaggaaaantctgtcancncatgatgatatgnttttgttancatctttcctgcnctgntattnataattngcngaagagaacnnacaggtcacaatttcntgccaaaaatcaaaatcgccnttttcagagattaaaaaacacccnaaantacccnaannnnctaanatcnatnactgtctcccaaangntttgggnntttctncaaanttttttntttntngggaacccnntggggggggttctttncttntttccaaaaatngcgnaaggtnnttttttcccaccnggnagt

SEQ ID NO: 82 - DNA, 938 bp, Homo Sapiens
  misc_feature (1)..(1): n is a, c, g, or t
  misc_feature (3)..(3): n is a, c, g, or t
  misc_feature (5)..(5): n is a, c, g, or t
  misc_feature (7)..(11): n is a, c, g, or t
  misc_feature (17)..(17): n is a, c, g, or t
  misc_feature (19)..(19): n is a, c, g, or t
  misc_feature (21)..(22): n is a, c, g, or t
  misc_feature (34)..(34): n is a, c, g, or t
  misc_feature (37)..(37): n is a, c, g, or t
  misc_feature (43)..(43): n is a, c, g, or t
  misc_feature (316)..(316): n is a, c, g, or t
  misc_feature (505)..(505): n is a, c, g, or t
  misc_feature (556)..(556): n is a, c, g, or t
  misc_feature (693)..(693): n is a, c, g, or t
  misc_feature (745)..(745): n is a, c, g, or t
  misc_feature (775)..(776): n is a, c, g, or t
  misc_feature (788)..(788): n is a, c, g, or t
  misc_feature (811)..(811): n is a, c, g, or t
  misc_feature (825)..(825): n is a, c, g, or t
  misc_feature (846)..(846): n is a, c, g, or t
  misc_feature (851)..(851): n is a, c, g, or t
  misc_feature (861)..(861): n is a, c, g, or t
  misc_feature (865)..(865): n is a, c, g, or t
  misc_feature (878)..(878): n is a, c, g, or t
  misc_feature (891)..(891): n is a, c, g, or t
  misc_feature (896)..(896): n is a, c, g, or t
  misc_feature (903)..(903): n is a, c, g, or t
  misc_feature (908)..(909): n is a, c, g, or t
  misc_feature (921)..(922): n is a, c, g, or t
  misc_feature (929)..(930): n is a, c, g, or t
  misc_feature (938)..(938): n is a, c, g, or t
ncncntnnnnnattccngnannggacgcatcccntcnccatcncggatcctatttaggtgacactatagaatcgtcgacccacgcgttccgaagggattgacttgtggtggcatgagctcatgcaagaggcaggggatgagtgtgagcccgagtggtgtgatgccgaggacccactcttcatcctgtacaccagtggctccacaggcaaacccaagggtgtggttcacacagctgggggctacatgctctatgtagccacaaccttcaagtatgtgtttgacttccatgcagaggatgtgttctggtgcacggcanacattggttggatcactggtcattcctacgtcacctatgggccactggccaatggtgccaccagtgttttgtttgaggggattcccacatatccggacgtgaaccgcctgtggagcattgtggacaaatacaaggtgaccaagttctacacagcacccacagccatccgtctgctcatgaagtttgganatgagcctgtcaccaagcatagccgggcatccttgcaggtgttaggcacantgggtgaacccatcaaccctgaggcctggctatggtaccaccgggtggtaggtgcccagcgctgccccatcgtggacaccttctggcaaacagagacaggtggccacatgttgactccccttcctggtgccacaccnatgaaacccggttctgctactttcccattctttggtgtagctcctgcaatcntgaatgaattccggggaaaaatttcaaggnnaagcttaaggtnatctggtgttcaaccacccctgnccagggatcatgcnacacagtctatgggaaccacngaacnctttaagacnaccnaacttttaaaaantttcctgaatacntatgnttaaaanaaaannggcttccacccnnaaacaannaaggtctn

SEQ ID NO: 83 - DNA, 964 bp, Homo Sapiens
  misc_feature (2)..(2): n is a, c, g, or t
  misc_feature (747)..(747): n is a, c, g, or t
  misc_feature (758)..(758): n is a, c, g, or t
  misc_feature (768)..(768): n is a, c, g, or t
  misc_feature (800)..(800): n is a, c, g, or t
  misc_feature (807)..(807): n is a, c, g, or t
  misc_feature (837)..(837): n is a, c, g, or t
  misc_feature (868)..(868): n is a, c, g, or t
  misc_feature (870)..(871): n is a, c, g, or t
  misc_feature (880)..(880): n is a, c, g, or t
  misc_feature (892)..(892): n is a, c, g, or t
  misc_feature (897)..(897): n is a, c, g, or t
  misc_feature (903)..(903): n is a, c, g, or t
  misc_feature (907)..(907): n is a, c, g, or t
  misc_feature (909)..(909): n is a, c, g, or t
  misc_feature (915)..(915): n is a, c, g, or t
  misc_feature (919)..(919): n is a, c, g, or t
  misc_feature (924)..(924): n is a, c, g, or t
  misc_feature (939)..(939): n is a, c, g, or t
  misc_feature (942)..(942): n is a, c, g, or t
  misc_feature (946)..(946): n is a, c, g, or t
  misc_feature (948)..(948): n is a, c, g, or t
  misc_feature (950)..(950): n is a, c, g, or t
  misc_feature (952)..(952): n is a, c, g, or t
  misc_feature (956)..(956): n is a, c, g, or t
  misc_feature (961)..(961): n is a, c, g, or t
antagagaaattactatgagaggatcgcatcaccatcaccatcacggatcctatttaggtgacactatagaatcgtcgacccacgcgtccgcccacgcgcgcggctacccatgccgaggtgagtccgcgggagccgccgccgccgccgtcccgtcccagctgccgccccgcgcggccccgccgccggccaggatgctggaggaagcgggcgaggtgctggagaacatgctgaaggcgtcttgtctgccgctcggcttcatcgtcttcctgcccgctgtgctgctgctggtggcgccgccgctgcctgccgccgacgccgcgcacgagttcaccgtgtaccgcatgcagcagtacgacctgcagggccagccctacggcacacggaatgcagtgctgaacacggaggcgcgcacgatggcggcggaggtgctgagccgccgctgcgtgctcatgcggctactggacttctcctacgagcagtaccagaaggccctgcggcagtcggcgggcgccgtggtcatcatcctgcccagggccatggccgccgtgccccaggacgtcgtccggcaattcatggagatcgagccggagatgctggccatggagaccgccgtccccgtgtactttgccgtggaggacgaggccctgctgtctatctacaagcagacccaggctgcctccgcctcccagggctccgcctctgctgctgaagtactgctgcgcacggccactgccaacggcttccanatggtcaccancggggtacanagcaaggccgtgagtgactggctgattgccancgtggangggcggctgacggggctgggcggaaaggancttcccaccatcgtcatcgtggcccactacnanncctttggantggccccctggntgtcnctgggngcgnantccaanggancggcntctctgtgctgctgnaantggnancntntttnccggnttt

SEQ ID NO: 84 - DNA, 1173 bp, Homo Sapiens
  misc_feature (283)..(283): n is a, c, g, or t
  misc_feature (778)..(778): n is a, c, g, or t
  misc_feature (882)..(882): n is a, c, g, or t
  misc_feature (905)..(905): n is a, c, g, or t
  misc_feature (908)..(908): n is a, c, g, or t
  misc_feature (936)..(936): n is a, c, g, or t
  misc_feature (942)..(942): n is a, c, g, or t
  misc_feature (946)..(946): n is a, c, g, or t
  misc_feature (949)..(949): n is a, c, g, or t
  misc_feature (972)..(972): n is a, c, g, or t
  misc_feature (986)..(986): n is a, c, g, or t
  misc_feature (1000)..(1000): n is a, c, g, or t
  misc_feature (1004)..(1004): n is a, c, g, or t
  misc_feature (1009)..(1009): n is a, c, g, or t
  misc_feature (1018)..(1018): n is a, c, g, or t
  misc_feature (1030)..(1030): n is a, c, g, or t
  misc_feature (1048)..(1048): n is a, c, g, or t
  misc_feature (1055)..(1055): n is a, c, g, or t
  misc_feature (1066)..(1066): n is a, c, g, or t
  misc_feature (1068)..(1068): n is a, c, g, or t
  misc_feature (1073)..(1073): n is a, c, g, or t
  misc_feature (1077)..(1078): n is a, c, g, or t
  misc_feature (1087)..(1087): n is a, c, g, or t
  misc_feature (1095)..(1095): n is a, c, g, or t
  misc_feature (1104)..(1104): n is a, c, g, or t
  misc_feature (1106)..(1106): n is a, c, g, or t
  misc_feature (1111)..(1111): n is a, c, g, or t
  misc_feature (1117)..(1117): n is a, c, g, or t
  misc_feature (1120)..(1120): n is a, c, g, or t
  misc_feature (1122)..(1122): n is a, c, g, or t
  misc_feature (1134)..(1134): n is a, c, g, or t
  misc_feature (1139)..(1139): n is a, c, g, or t
  misc_feature (1145)..(1145): n is a, c, g, or t
  misc_feature (1159)..(1160): n is a, c, g, or t
  misc_feature (1164)..(1164): n is a, c, g, or t
  misc_feature (1167)..(1167): n is a, c, g, or t
  misc_feature (1169)..(1169): n is a, c, g, or t
tagagagattactatgagaggatcgcatcaccatcaccatcacggatcctatttaggtgacactatagaatcgtcgacccacgcgtccgcccacgcgtccggctccacggagcacgccctgtgcgggaagccagaccagatcgagggctcgctggcggccttcctgcccgacctgtccctggccaagaggaagacctggcggaacccttggcggcgttcctaccacaagcgcaagaaggccgagtgggaggtggaccctgactactgcgaggaggtgaagcanacaccgccctacgacagcagccaccgcatcctggacgtcatggacatgacgatcttcgacttcctcatgggaaacatggaccgtcaccactacgagacttttgagaagtttgggaatgaaacgttcatcatccacttagacaatggaagagggtttgggaagtattcgcacgacgagctctccatcctggtgccgctacagcagtgctgcaggatccggaagtccacctacctgcgtctgcagctcctggccaaggaggagtacaagctgagcctgctgatggccgagtctctgcggggggaccaggtggcacccgtgctgtaccagccgcacctggaggccctggaccggcggctccgcgtcgttctaaaggccgtccgggactgcgtggagagggacgggctccacagcgtggtggatgacgacctggacactgagcacagagccgcctcggcgaggtagtgtccgccggccgctgcgctgcccgggacaganacagaggggccggacctcccagcaagcgcatgcgcccgtcgtgaattcagtgaattcagaggcaggacgggatcatccggagtcgggagctgctgccacaggangcgaggctccccaggtctcatanganacattttgtcagtgtttgaccaaaaaancttggnaagnaancgctgtctgtgctcacgaaaaangcggccggcgccgnaggcatttcattcntttntgtanggaaaggancctttatttacnatttggatttaatttgangaaaaantatataaaccnanaactntacnnaaatgccantccctacnaaccaaccnangaacnccctcntgntntgggggcccctnaggcnaactcncccccaggtttccnntcgnacnanttaa

SEQ ID NO: 85 - DNA, 1305 bp, Homo Sapiens
  misc_feature (959)..(959): n is a, c, g, or t
  misc_feature (969)..(969): n is a, c, g, or t
  misc_feature (991)..(991): n is a, c, g, or t
  misc_feature (1000)..(1000): n is a, c, g, or t
  misc_feature (1033)..(1033): n is a, c, g, or t
  misc_feature (1047)..(1047): n is a, c, g, or t
  misc_feature (1070)..(1070): n is a, c, g, or t
  misc_feature (1074)..(1074): n is a, c, g, or t
  misc_feature (1093)..(1093): n is a, c, g, or t
  misc_feature (1096)..(1096): n is a, c, g, or t
  misc_feature (1104)..(1105): n is a, c, g, or t
  misc_feature (1110)..(1110): n is a, c, g, or t
  misc_feature (1118)..(1118): n is a, c, g, or t
  misc_feature (1122)..(1122): n is a, c, g, or t
  misc_feature (1145)..(1145): n is a, c, g, or t
  misc_feature (1147)..(1147): n is a, c, g, or t
  misc_feature (1154)..(1155): n is a, c, g, or t
  misc_feature (1172)..(1172): n is a, c, g, or t
  misc_feature (1175)..(1175): n is a, c, g, or t
  misc_feature (1179)..(1179): n is a, c, g, or t
  misc_feature (1187)..(1188): n is a, c, g, or t
  misc_feature (1190)..(1190): n is a, c, g, or t
  misc_feature (1196)..(1196): n is a, c, g, or t
  misc_feature (1198)..(1198): n is a, c, g, or t
  misc_feature (1203)..(1203): n is a, c, g, or t
  misc_feature (1213)..(1213): n is a, c, g, or t
  misc_feature (1216)..(1216): n is a, c, g, or t
  misc_feature (1230)..(1232): n is a, c, g, or t
  misc_feature (1238)..(1238): n is a, c, g, or t
  misc_feature (1242)..(1242): n is a, c, g, or t
  misc_feature (1247)..(1247): n is a, c, g, or t
  misc_feature (1252)..(1252): n is a, c, g, or t
  misc_feature (1259)..(1259): n is a, c, g, or t
  misc_feature (1278)..(1278): n is a, c, g, or t
  misc_feature (1280)..(1280): n is a, c, g, or t
  misc_feature (1289)..(1289): n is a, c, g, or t
  misc_feature (1293)..(1293): n is a, c, g, or t
tagagagaattactatgagaggatcgcatcaccatcaccatcacggatcctatttaggtgacactatagaatcgtcgacccacgcgtccggtcgcagaaaggtgacagcagaagcagatagcagtagtccaactgggatattagccacctcagagtccaaatccatgccagtgttgggttctgtatccagtgtaacaaaaacagccttgaacaagaaaactctggaggcagaattcaacagcccgtcccccccaacacctgagccaggtgaagggccccgtaaattggaaggatgcacaagttccaaggttacgtttcagcctcccagtagcattggatgcaggaaaaaatacattgacggtgaaaaacaagccgaaccagttgtagttttagatcctgtttctacacatgaaccccaaaccaaagaccaggttgctgaaaaagatccaactcaacacaaggaggatgaaggcgaaattcaaccagaaaacaaagaagacagcattgaaaacgtgagagagacagacagctccaactgctgatccataaaccagaagcctgacatgtttggaagtccttttcaataagcacatgattagtgttgttatattggcaagggctgtagacattctgctctggtcactgtattcagaatacaggttcttttctggtgtcacttttgtaagtagcaactataaacataagtaagctgtttagcaaaacacacattcctagtaggttttggttttttgatctttataaagatgaggtttttttcctagttactgtattaagtatgacttcttttagaaggttacaaaaaaattcagatgttgatacctttttaggaaatgtgcataccactcatcaaatggaatgctgaaagtttgaggtgcttgtatataatcggataaacaaaactgatcaacccaatgtgattttaaaagcccccaaaaaancttctgtttngggtctgatcctcttgatgganaaactgcancaccatggaaattgttgggtactgtggcatacnagtttttttctacngtaaactggaaataaactgaaanctcnggagctggcatcaaactcntantcccctanncgggntaattacncccnttgttaacttttggaagaaaaanantgctttnnattggtccaaacccccnaanaccncggggganncntgggancngaaanaaaatgaggnaantccaccttgatttnnngaaaantggnaaccnggccngggcctnaataattttttcccaaacnanggggccaanccanttttcaattttt

SEQ ID NO: 86 - DNA, 1036 bp, Homo Sapiens
  misc_feature (3)..(3): n is a, c, g, or t
  misc_feature (6)..(11): n is a, c, g, or t
  misc_feature (775)..(775): n is a, c, g, or t
  misc_feature (803)..(803): n is a, c, g, or t
  misc_feature (829)..(829): n is a, c, g, or t
  misc_feature (846)..(846): n is a, c, g, or t
  misc_feature (858)..(858): n is a, c, g, or t
  misc_feature (860)..(860): n is a, c, g, or t
  misc_feature (872)..(872): n is a, c, g, or t
  misc_feature (874)..(874): n is a, c, g, or t
  misc_feature (891)..(891): n is a, c, g, or t
  misc_feature (925)..(925): n is a, c, g, or t
  misc_feature (949)..(949): n is a, c, g, or t
  misc_feature (966)..(966): n is a, c, g, or t
  misc_feature (971)..(971): n is a, c, g, or t
  misc_feature (973)..(973): n is a, c, g, or t
  misc_feature (988)..(988): n is a, c, g, or t
  misc_feature (991)..(991): n is a, c, g, or t
  misc_feature (994)..(995): n is a, c, g, or t
  misc_feature (1007)..(1008): n is a, c, g, or t
  misc_feature (1011)..(1011): n is a, c, g, or t
  misc_feature (1022)..(1023): n is a, c, g, or t
  misc_feature (1031)..(1032): n is a, c, g, or t
  misc_feature (1035)..(1035): n is a, c, g, or t
gtnttnnnnnngattagagaaattactatgagaggatcgcatcaccatcaccatcacggtatcctatttaggtgacactatagaatcgtcgacccacgcgtccgcccagccagtgctgcccactgacagcgccagccgaggtggagtggccgtggtccccgcatcaggtgactgtgtccccagcccctgccacaatggtgggacatgcttggaggaggaggaaggggtccgctgcctatgtctgcctggctatgggggggacctgtgcgatgttggcctccgcttctgcaaccccggctgggacgccttccagggcgcctgctacaagcacttttccacacgaaggagctgggaggaggcagagacccagtgccggatgtacggcgcgcatctggccagcatcagcacacccgaggaacaggacttcatcaacaaccggtaccgggagtaccagtggatcggactcaacgacaggaccatcgaaggcgacttcttgtggtcggatggcgtccccctgctctatgagaactggaaccctgggcagcctgacagctacttcctgtctggagagaactgcgtggtcatggtgtggcatgatcagggacaatggagtgacgtgccctgcaactaccacctgtcctacacctgcaagatggggctggtgtcctgtgggccgccaccggagctgcccctggctcaagtgttcggccgcccacggctgcgctatgaggtggacactgtgcttcgctaccggtgccgggaaggactggcccancgcaatctgccgctgatccgatgccaanagaacggtcgttgggaggccccccanatctcctgtgtgcccanaaaacctgcccnanctctgcacccanangaggaccaaaaaggacntcagggaaggctactgggacctggaaaggcgctnttgatccccccttccaccccatgncaggtccctaagggggnaaagncnttgaaaactgccggncanaannactgccctgtcnnccnaaattttcctnnaaccctgnnctnc

SEQ ID NO: 87 - DNA, 965 bp, Homo Sapiens
tgagaggtcgcatcaccatcaccatcacggatcctatttaggtgacactatagaatcgtcgacccacgcgtccgagaaacctcatgaatgtagtgaatgtgggaaagtctttagccagaggtcccaccttgtcacacaccagaaaatccacactggagagaagccctatcagtgcactgaatgtgaaaaagccttcaggcggcgttcactccttattcaacgtcggagaattcatagtggtgagaaaccctatgaatgtaaggaatgtgggaaactcttcatgtggcacacagctttcctcaaacatcagagactgcatgctggagagaaacttgaagaatgtgagaaaaccttcagcaaggatgaggagcttaggggagagcagaaaattcaccaagaagagaaagcttattggtgtaatcagtgtggtagggctttccagggcagctcagacctcatcggacatcaggtaactcatacaggagagaaaccatatgaatgtaaagaatgtgggaaaactttcaatcagagctcagaccttctgagacatcatagaattcacagtggagaaaaaccttatgtatgcaacaaatgtgggaaatcttttaggggcagctcagatcttattagacaccatcgtgttcatactggagagaaaccctatgaatgccctgaatgttggaaggccttcagtcagaactcacaccttgtcagtcatcaaagaattcataccagagagaaaccctttgaatgtagcaactgtggtaaggccttcagtgggtggacagcttttcttaagcaccagaaacttcacattggaaaggaatttgaagactgtaagagtctacaaacaggacctattctaataggtagcagaacctaatgaatgcagtaaaactaggaaaagtctgatggagaccacatcttattgcactacaaatgagttttattagaaaaaaaccatg

SEQ ID NO: 88 - DNA, 1184 bp, Homo Sapiens
  misc_feature (804)..(804): n is a, c, g, or t
  misc_feature (852)..(852): n is a, c, g, or t
  misc_feature (964)..(964): n is a, c, g, or t
  misc_feature (970)..(970): n is a, c, g, or t
  misc_feature (992)..(993): n is a, c, g, or t
  misc_feature (1000)..(1000): n is a, c, g, or t
  misc_feature (1038)..(1038): n is a, c, g, or t
  misc_feature (1042)..(1042): n is a, c, g, or t
  misc_feature (1048)..(1048): n is a, c, g, or t
  misc_feature (1062)..(1062): n is a, c, g, or t
  misc_feature (1072)..(1072): n is a, c, g, or t
  misc_feature (1075)..(1075): n is a, c, g, or t
  misc_feature (1100)..(1100): n is a, c, g, or t
  misc_feature (1106)..(1106): n is a, c, g, or t
  misc_feature (1113)..(1113): n is a, c, g, or t
  misc_feature (1115)..(1115): n is a, c, g, or t
  misc_feature (1119)..(1120): n is a, c, g, or t
  misc_feature (1131)..(1131): n is a, c, g, or t
  misc_feature (1133)..(1134): n is a, c, g, or t
  misc_feature (1139)..(1139): n is a, c, g, or t
  misc_feature (1153)..(1153): n is a, c, g, or t
  misc_feature (1163)..(1163): n is a, c, g, or t
  misc_feature (1166)..(1167): n is a, c, g, or t
  misc_feature (1174)..(1175): n is a, c, g, or t
  misc_feature (1183)..(1183): n is a, c, g, or t
agagagattactatgagaggatcgcatcaccatcaccatcacggatcctatttaggtgacactatagaatcgtcgacccacgcgtccgcttggcctgcagatgcaccctcctggatgaataagcctgtggttgatggaaattcacaaagtgaggcattatcactggaaatgagaaaggatccgagcggggctggcctctggcttcacagtggcggcccagtgcttccatatgtgagagaatcagtaagaagaaatccagcctcagcagccactccgagcacagccgtgggtttgttccctgctccaacagagtgttttgctcgggtgtcctgcagtggtgttgaagctctggggcggcgagactggctgggaggagggcccagggccactgacggccacagaggacagtgccccaaaggagagcctcgggtgtcacgactgccacgccatcaaaaagtgccggaaatgggaagttttcaggatgacccaccaagtgcttttcccaagggtctgggctctgagttggaacccgcttgcctgcactccatcctgtctgcaacgctgcacgtgtatcccgaagtgctcctgagtgaggagacaaaacgcattttccttgaccgtttaaagcccatgttttcaaagcaaacaatagaattcaagaaaatgcttaaaagcacctcagatggtctgcagataacactggggttactggctctgcaaccttttgaattagcaaatacattatgccatagttaaggtacaagcagaacaataccaatagattaattttaagagttgtcttanaatgatttctttcgcattaagtctggatgcaaactgtgcagcccttangttcctgctgtagttttgtacgacctggcagacttaaagtaattgagtttaaattcaaagccagttgatgcggaaggaactttttggcatgtgttaaattgtgctttaaaanacatanaaaaaaattgggaaacatttcnngggaacnatcatagcctgttaaaaatcccaaattaaaaacatacngganttaccntgaaattcttgtcnttcaaaatcnatnctaaagggctactgtcccaaaaccngggggnccttttnanttgnncggaacccccnannggaantggaaacttgtaantccaaccccnctnnacttggnntaaatctng

SEQ ID NO: 89 - DNA, 1181 bp, Homo Sapiens
  misc_feature (794)..(794): n is a, c, g, or t
  misc_feature (834)..(834): n is a, c, g, or t
  misc_feature (868)..(868): n is a, c, g, or t
  misc_feature (899)..(899): n is a, c, g, or t
  misc_feature (901)..(901): n is a, c, g, or t
  misc_feature (904)..(904): n is a, c, g, or t
  misc_feature (909)..(909): n is a, c, g, or t
  misc_feature (923)..(923): n is a, c, g, or t
  misc_feature (926)..(926): n is a, c, g, or t
  misc_feature (932)..(932): n is a, c, g, or t
  misc_feature (943)..(943): n is a, c, g, or t
  misc_feature (948)..(948): n is a, c, g, or t
  misc_feature (951)..(951): n is a, c, g, or t
  misc_feature (955)..(955): n is a, c, g, or t
  misc_feature (964)..(964): n is a, c, g, or t
  misc_feature (986)..(986): n is a, c, g, or t
  misc_feature (1027)..(1027): n is a, c, g, or t
  misc_feature (1034)..(1034): n is a, c, g, or t
  misc_feature (1038)..(1038): n is a, c, g, or t
  misc_feature (1043)..(1043): n is a, c, g, or t
  misc_feature (1060)..(1060): n is a, c, g, or t
  misc_feature (1067)..(1067): n is a, c, g, or t
  misc_feature (1071)..(1071): n is a, c, g, or t
  misc_feature (1078)..(1078): n is a, c, g, or t
  misc_feature (1087)..(1087): n is a, c, g, or t
  misc_feature (1091)..(1091): n is a, c, g, or t
  misc_feature (1101)..(1101): n is a, c, g, or t
  misc_feature (1104)..(1104): n is a, c, g, or t
  misc_feature (1110)..(1110): n is a, c, g, or t
  misc_feature (1114)..(1114): n is a, c, g, or t
  misc_feature (1116)..(1117): n is a, c, g, or t
  misc_feature (1124)..(1124): n is a, c, g, or t
  misc_feature (1130)..(1130): n is a, c, g, or t
  misc_feature (1139)..(1139): n is a, c, g, or t
  misc_feature (1143)..(1143): n is a, c, g, or t
  misc_feature (1151)..(1151): n is a, c, g, or t
  misc_feature (1164)..(1164): n is a, c, g, or t
  misc_feature (1167)..(1168): n is a, c, g, or t
  misc_feature (1175)..(1175): n is a, c, g, or t
  misc_feature (1178)..(1178): n is a, c, g, or t
aatagagaaattaactatgagaggatcgcatcaccatcaccatcacggatcctatttaggtgacactatagaatcgtcgacccacgcgtccgcccacgcgtccgtgctgttgttgctggttcttctgagcccctccactggcagcctgtgtacagtgctgtggctaaattgatgaccgacttcatttgcagtggaggtgcatcaagagcccggggcagcggtgcccagaggccaggaggcccctgaaggcaaggccagggagacggtggagaatctgcctcccctgcctttggaccctgtcctcagagctcctgggggccgccctgctccatcccaggaccttaaccagcgctccctggagcactctgaggggcctgtgggcagagaccctgctggccctcctgacggcggccctgacacagagcctcgggcagcccagggcaagctgagagatggccagaaggatgccgcccccagggcagctggcactgtgaaggagctccccaagggcccggagcaggtgcccgtgccagaccccgccagggaagccgggggcccagaggagcgcctcgcagaggaattccctgggcaaagtcaggacgttactggcggttcccaagacaggaaaaaacctgggaaggaggtggcagccactggcaccagcattctgaaggaagccaactggctcgtggcagggccaggagcagagacgggggaccctcgcatgaagcccaagcaagtgagccgagacctgggccttgcagcggacctgcccggtggggcggaaggagcanctgcacagccccaggctgtgttacgccagccggaactgcnggtcatctctgatggcgagcagggtggacagcanggccaccggctggaccatggcggtcacctgnanatnaaaangcccgcgggggggnacnatgtgnctgtgtccacnaacanccnaaangcggggaanaacctgctgtccaagaacccangcaaaagccaaaaccaaaactggggctcaacaaactttccngggggcnaaangccgnaaaatgccaagccaacnggaactnaaantgcaggntggttccanctcngaagcaaggnggnacttgncctntnnaaaggtnacttgncccaaagangggnctttggcnttaacccctgccnaanntcaagtnaanaac

SEQ ID NO: 90 - DNA, 963 bp, Homo Sapiens
tgagaggtcgcatcaccatcaccatcacggatcctatttaggtgacactatagaatcgtcgacccacgcgtccggcgggcgccgcagcgggagcgggagccggagctgcgaggcgcggcgcagagctggggctgcgcggggccgggcgagcgggaccaggcgggagccatggaccgctagggcccggcctagccccgcgatgccgccggcgagtggccccagcgtcctcgcgcggctgttgccgctgctggggctgctgctcggcagcgcctcccgggctcccggcaagtcgccgccggagccccccagcccgcaggagatcctgatcaaggtgcaggtgtatgtgagcggggagctggtgcccctggcccgggcctcagtggatgtgtttgggaaccggactctgctggcagctggcaccacagactcagagggtgtggccaccctgcccctcagttatcgcttgggcacctgggtgctggtcactgctgcccgccctggcttcctcaccaactctgtgccctggcgtgttgacaagctgcccttgtatgcgtctgtcagcctctacctgctccctgagcggccggccacgctcatcctctatgaggacctggtgcacattctcctaggctctcccggtgcccgctcccagcccttggtgcagttccagcgccgggctgcccgcctgcctgtcagctccacctacagccagctctgggcgtcacttacgcctgccagcacccagcaggaaatgcgggctttccctgccttcctgggcactgaggcctccagctcaggcaatggctcctggctggagctgatgcccctgactgctgtgagcgtgcacctgctgacaggtaatgggacagaggtgccgctctcagccccattcacctgtccctgcccgtgccctccgagactcgtgccctcaccgtgggcaccagcattccagcctggagattt

SEQ ID NO: 91 - DNA, 1175 bp, Homo Sapiens
  misc_feature (913)..(913): n is a, c, g, or t
  misc_feature (928)..(928): n is a, c, g, or t
  misc_feature (932)..(932): n is a, c, g, or t
  misc_feature (941)..(941): n is a, c, g, or t
  misc_feature (950)..(950): n is a, c, g, or t
  misc_feature (972)..(972): n is a, c, g, or t
  misc_feature (994)..(994): n is a, c, g, or t
  misc_feature (998)..(998): n is a, c, g, or t
  misc_feature (1003)..(1003): n is a, c, g, or t
  misc_feature (1009)..(1009): n is a, c, g, or t
  misc_feature (1016)..(1016): n is a, c, g, or t
  misc_feature (1029)..(1029): n is a, c, g, or t
  misc_feature (1031)..(1031): n is a, c, g, or t
  misc_feature (1037)..(1037): n is a, c, g, or t
  misc_feature (1056)..(1056): n is a, c, g, or t
  misc_feature (1059)..(1059): n is a, c, g, or t
  misc_feature (1061)..(1061): n is a, c, g, or t
  misc_feature (1064)..(1064): n is a, c, g, or t
  misc_feature (1067)..(1067): n is a, c, g, or t
  misc_feature (1097)..(1097): n is a, c, g, or t
  misc_feature (1104)..(1104): n is a, c, g, or t
  misc_feature (1123)..(1123): n is a, c, g, or t
  misc_feature (1130)..(1131): n is a, c, g, or t
  misc_feature (1136)..(1136): n is a, c, g, or t
  misc_feature (1159)..(1159): n is a, c, g, or t
  misc_feature (1164)..(1164): n is a, c, g, or t
  misc_feature (1168)..(1169): n is a, c, g, or t
tagagagaattactatgagaggatcgcatcaccatcaccatcacggatcctatttaggtgacactatagaatcgtcgacccacgcgtccggtgaacctctgaacaaagataagatagaagaacttaaaaagaacagagaagagcaagtccagaagaagaagaaaatattgaaagaactgcagaaagtggaaaggcagttgcagatgaaaacacagcagcaatttaccaaagaatacttggaaaccaaaggtcagaaagacacagtgtctctacaccaacagtgctctcatagaggagtcttcccagaaggggaaggagatggtagtctcccagaggatcacttttcagagttacctcaggttgacacaatcttatttaaagataatgatgttgatgatgagcaacagtctccaccatcggcagaacagattgattttgtcccagtccagcctttatcatctccacagtgtaacttttccagtgacttaggttctaatgggacaaattctcttgaacttcagaaagtatcaggtaatcagcagattgtaggacagcctcagattgctattactggacatgatcaggggctgttagttcaagaaccagatggactaatggttgcaactccagctcagacgcttaccgacactcttgatgacctgatagcagctgtgagtaccagagtgcccactggttccaacagttcttctcagaccacagagtgtcttacacctgaatcctgttcgcagactacaagcaatgtggcttcccaatcgatgcctcctgtgtatccttcagttgacattgatgcacatactgagagcaatcatgacacagcattaacactagcttgtgcaggtggtcatgaagaacttgtatctgtgctcattgcccgggatgcccaaattgaacncagagacaaaaaggnttcncaccactantcctggcancacagcagggcatgttggagtngttgaaatcctttggataaggngganattanaagccngtctgancgaactaggaacncnctttcntggcagttcgggggactcnggngnggnaantgctgctggctccagggcaataagaactanggacgtnctgatttaccccctgatcnactgccnnggggnaatgttaatccttaaaatcgctnagggngggnnaaatta

SEQ ID NO: 92 - DNA, 455 bp, Homo Sapiens
  misc_feature (1)..(1): n is a, c, g, or t
naatagagaaattactatggagaggatcgcatcaccatcaccatcacggatcctatttaggtgacactatagaatcgtcgacccacgcgtccgagaaagcagagcagtatcaacccctcacagcctcagtcagcctccagaactccctagatgcccccatggaggactgtgtgatctccatcctgggaagggggctcattcacagagagaggagctacagattccgttcagtgtggcctgaaaacaccatgtgtgccaagttccagttcacgccaacacatgtggggctccagagactcactgtggaagtggactgcaacatgttccagaacctaaccaactataaaagcgtcaccgtggtagcccctgaactatcagcttaaacttccagctctatcaccactctcctgccaacccttgttctacaatctaaaccaaacatgtgctaggaagag

SEQ ID NO: 93 - DNA, 1179 bp, Homo Sapiens
  misc_feature (870)..(870): n is a, c, g, or t
  misc_feature (887)..(887): n is a, c, g, or t
  misc_feature (899)..(899): n is a, c, g, or t
  misc_feature (922)..(922): n is a, c, g, or t
  misc_feature (925)..(925): n is a, c, g, or t
  misc_feature (929)..(929): n is a, c, g, or t
  misc_feature (939)..(939): n is a, c, g, or t
  misc_feature (951)..(951): n is a, c, g, or t
  misc_feature (956)..(956): n is a, c, g, or t
  misc_feature (978)..(978): n is a, c, g, or t
  misc_feature (990)..(990): n is a, c, g, or t
  misc_feature (1005)..(1005): n is a, c, g, or t
  misc_feature (1020)..(1020): n is a, c, g, or t
  misc_feature (1034)..(1034): n is a, c, g, or t
  misc_feature (1067)..(1068): n is a, c, g, or t
  misc_feature (1084)..(1084): n is a, c, g, or t
  misc_feature (1097)..(1097): n is a, c, g, or t
  misc_feature (1120)..(1120): n is a, c, g, or t
  misc_feature (1127)..(1127): n is a, c, g, or t
  misc_feature (1132)..(1133): n is a, c, g, or t
  misc_feature (1139)..(1139): n is a, c, g, or t
  misc_feature (1147)..(1147): n is a, c, g, or t
  misc_feature (1153)..(1153): n is a, c, g, or t
  misc_feature (1158)..(1158): n is a, c, g, or t
  misc_feature (1168)..(1168): n is a, c, g, or t
  misc_feature (1170)..(1170): n is a, c, g, or t
  misc_feature (1175)..(1175): n is a, c, g, or t
tagagaaattactatgagaggatcgcatcaccatcaccatcacggatcctatttaggtgacactatagaatcgtcgacccacgcgtccgggctggaaaggcagccagtgaccaaaaacaccttcaggcaataccgagtcctgggcaaaggtggctttggggaggtgtgcgcctgccaggtgcgggccacaggtaagatgtatgcctgcaagaagctagagaaaaagcggatcaagaagcggaaaggggaggccatggcgctgaacgagaagcagatcctggagaaagtgaacagtaggtttgtagtgagcttggcctacgcctatgagaccaaggacgcgctgtgcctggtgctgacactgatgaacgggggcgacctcaagttccacatctaccacatgggccaggctggcttccccgaagcgcgggccgtcttctacgccgccgagatctgctgtggcctggaggacctgcaccgggagcgcatcgtgtacagggacctgaagcccgagaacatcttgctggatgaccacggccacatccgcatctctgacctgggactagctgtgcatgtgcccgagggccagaccatcaaagggcgtgtgggcaccgtgggttacatggctccggaggtggtgaagaatgaacggtacacgttcagccctgactggtgggcgctcggctgcctcctgtacgagatgatcgcaggccagtcgcccttccagcagaggaagaagaagatcaagcgggaggaggtggagcggctggtgaaggaggtccccgaggagtattccgagcgcttttccccgcaggcccgctcactttgctcacagctcctctgcaaggaccctgccgaacgcctggggtgtcntgggggcagtgcccgcnaggtgaaagaancaccccctctttaaaaagctganctncaancggctggganctggcatgctgnaaccnccgttcaagcctgacccccagncatttactgcangatgttctggacttnaacagttctctacgntcaagggcgtgganctgaacctaccaccagacttttaccaaaatttnncccaggcatgggcccntcccctggcaaanaaaatgtggaaaccaatgcttcnaaaactnaattnntttggnctggatgntcattnccccnaactgaatgnanggccncccc

SEQ ID NO: 94 - DNA, 1094 bp, Homo Sapiens
  misc_feature (792)..(792): n is a, c, g, or t
  misc_feature (882)..(882): n is a, c, g, or t
  misc_feature (897)..(897): n is a, c, g, or t
  misc_feature (931)..(931): n is a, c, g, or t
  misc_feature (942)..(942): n is a, c, g, or t
  misc_feature (955)..(955): n is a, c, g, or t
  misc_feature (969)..(969): n is a, c, g, or t
  misc_feature (976)..(976): n is a, c, g, or t
  misc_feature (989)..(989): n is a, c, g, or t
  misc_feature (1006)..(1006): n is a, c, g, or t
  misc_feature (1011)..(1011): n is a, c, g, or t
  misc_feature (1016)..(1016): n is a, c, g, or t
  misc_feature (1025)..(1026): n is a, c, g, or t
  misc_feature (1044)..(1044): n is a, c, g, or t
  misc_feature (1048)..(1048): n is a, c, g, or t
  misc_feature (1050)..(1053): n is a, c, g, or t
  misc_feature (1055)..(1055): n is a, c, g, or t
  misc_feature (1057)..(1057): n is a, c, g, or t
  misc_feature (1059)..(1059): n is a, c, g, or t
  misc_feature (1063)..(1063): n is a, c, g, or t
  misc_feature (1068)..(1068): n is a, c, g, or t
  misc_feature (1072)..(1072): n is a, c, g, or t
  misc_feature (1076)..(1076): n is a, c, g, or t
  misc_feature (1079)..(1079): n is a, c, g, or t
  misc_feature (1082)..(1082): n is a, c, g, or t
  misc_feature (1093)..(1093): n is a, c, g, or t
tagagagattaactatgagaggatcgcatcaccatcaccatcacggatcctatttaggtgacactatagaatcgtcgacccacgcgtccggtggccagggatcaggcagcggctcaggcgaccctgagtgtgcccccaccccgccatggcccggctgctgcaggcgtcctgcctgctttccctgctcctggccggcttcgtctcgcagagccggggacaagagaagtcgaagatggactgccatggtggcataagtggcaccatttacgagtacggagccctcaccattgatggggaggagtacatccccttcaagcagtatgctggcaaatacgtcctctttgtcaacgtggccagctactgaggcctgacgggccagtacattgaactgaatgcactacaggaagagcttgcaccattcggtctggtcattctgggctttccctgcaaccaatttggaaaacaggaaccaggagagaactcagagatccttcctaccctcaagtatgtccgaccaggtggaggctttgtccctaatttccagctctttgagaaaggggatgtcaatggagagaaagagcagaaattctacactttcctaaagaactcctgtcctcccacctcggagctcctgggtacatctgaccgcctcttctgggaacccatgaaggttcacgacatccgctggaactttgagaagttcctggtggggccagatggtatacccatcatgcgctggcaccaccggaccacggtcagcaacgtcaagatggacatcctgtcctacatgangcggcaggcagccctggggggtcaagaggaagtaactgaaggccgtctcatcccatgtccaccatgtaggggagggactttgttcagganaaaatccgtgtctcnaaccacactatctacccatcacagacccctttcntatcactcaanggccccacctggnacaaatggatgcanacagttntgtgtaactgccnagcatgtgggtgtgggngcatntgggngtttaaacnnatgcccaaaagaatgccngaantnnnngngngngcanggggntacncccncgngtntacctatgtgnt

SEQ ID NO: 95 - DNA, 1226 bp, Homo Sapiens
  misc_feature (848)..(848): n is a, c, g, or t
  misc_feature (864)..(864): n is a, c, g, or t
  misc_feature (899)..(899): n is a, c, g, or t
  misc_feature (928)..(928): n is a, c, g, or t
  misc_feature (968)..(968): n is a, c, g, or t
  misc_feature (991)..(991): n is a, c, g, or t
  misc_feature (1000)..(1000): n is a, c, g, or t
  misc_feature (1004)..(1004): n is a, c, g, or t
  misc_feature (1017)..(1017): n is a, c, g, or t
  misc_feature (1028)..(1028): n is a, c, g, or t
  misc_feature (1031)..(1031): n is a, c, g, or t
  misc_feature (1052)..(1052): n is a, c, g, or t
  misc_feature (1070)..(1070): n is a, c, g, or t
  misc_feature (1077)..(1077): n is a, c, g, or t
  misc_feature (1081)..(1081): n is a, c, g, or t
  misc_feature (1103)..(1103): n is a, c, g, or t
  misc_feature (1115)..(1115): n is a, c, g, or t
  misc_feature (1125)..(1125): n is a, c, g, or t
  misc_feature (1127)..(1127): n is a, c, g, or t
  misc_feature (1165)..(1165): n is a, c, g, or t
  misc_feature (1171)..(1171): n is a, c, g, or t
  misc_feature (1174)..(1174): n is a, c, g, or t
  misc_feature (1187)..(1187): n is a, c, g, or t
  misc_feature (1189)..(1189): n is a, c, g, or t
  misc_feature (1193)..(1193): n is a, c, g, or t
  misc_feature (1198)..(1198): n is a, c, g, or t
  misc_feature (1203)..(1204): n is a, c, g, or t
  misc_feature (1209)..(1209): n is a, c, g, or t
  misc_feature (1213)..(1214): n is a, c, g, or t
  misc_feature (1218)..(1218): n is a, c, g, or t
  misc_feature (1221)..(1221): n is a, c, g, or t
  misc_feature (1224)..(1224): n is a, c, g, or t
tagagaaattaactatgagaggatcgcatcaccatcaccatcacggatcctatttaggtgacactatagaatcgtcgacccacgcgtccggcggcgctgagggctttgtgcggcttccggggcgtcgcggcccaggtgctgcggcctggggctggagtccgattgccgattcagcccagcagaggtgttcggcagtggcagccagatgtggaatgggcacagcagtttgggggagctgttatgtacccaagcaaagaaacagcccactggaagcctccaccttggaatgatgtggaccctccaaaggacacaattgtgaagaacattaccctgaactttgggccccaacacccagcagcgcatggtgtcctgcgactagtgatggaattgagtggggagatggtgcggaagtgtgatcctcacatcgggctcctgcaccgaggcactgagaagctcattgaatacaagacctatcttcaggcccttccatactttgaccggctagactatgtgtccatgatgtgtaacgaacaggcctattctctagctgtggagaagttgctaaacatccggcctcctcctcgggcacagtggatccgagtgctgtttggagaaatcacacgtttgttgaaccacatcatggctgtgaccacacatgccctggaccttggggccatgacccctttcttctggctgtttgaagaaagggagaagatgtttgagttctacgagcgagtgtctggagcccgaatgcatgctgcttatatccggccaggaggagtgcaccaggacctaccccttgggcttatggatgacatttatcagttttctaagaacttctctcttcngcttgatgagttggangagttgctgaccaacaataggatctggcgaaatcngacaattgacattggggttgtaacagcanaaaaagcacttaactatggttttagtggagtgatgcttcngggctcaggcatccagtgggacntgcgaaaanccanccctatgatgttnacaaccaggtngantttgatgttcctgttggttcncgaggggactgctatganaggtacntgtnccgggtggaagaaaatcccccntcccctgaaaantatccccaangntctaaaaaaatgccccctgggggaaaacaaggttgaanattccnaantttcccccctaancnaacnaaaanaaaanntcccngggnncccngantcncc

SEQ ID NO: 96 - DNA, 891 bp, Homo Sapiens
  misc_feature (886)..(886): n is a, c, g, or t
tagagaaattactatgagaggatcgcatcaccatcaccatcacggatcctatttaggtgacactatagaatcgtcgacccacgcgtccgggaggagaaagatggcggctaccttactagctgctcggggagccgggccagcaccggcttgggggccggaggcgttcactccagactgggaaagccgagaagtttccactgggaccactatcatggccgtgcagtttgacgggggcgtggttctgggggcggactccagaacaaccactgggtcctacatcgccaatcgagtgactgacaagctgacacctattcacgaccgcattttctgctgtcgctcaggctcagctgctgatacccaggcagtagctgatgctgtcacctaccagctcggtttccacagcattgaactgaatgagcctccactggtccacacagcagccagcctctttaaggagatgtgttaccgataccgggaagacctgatggcgggaatcatcatcgcaggctgggaccctcaagaaggagggcaggtgtactcagtgcctatggggggtatgatggtaaggcagtcctttgccattggaggctccgggagctcctacatctatggctatgttgatgctacctaccgggaaggcatgaccaaggaagagtgtctgcaattcactgccaatgctctcgctttggccatggagcgggatggctccagtggaggagtgatccgcctggcagccattgcagagtcaggggtagagcggcaagtacttttgggagaccagatacccaaattcgccgttgccactttaccacccgcctgaatcctgggattctagtatgcaataagagatgccctgtactgatgcaaaatttaataaagtttgtcncagag

SEQ ID NO: 97 - DNA, 1019 bp, Homo Sapiens
  misc_feature (3)..(9): n is a, c, g, or t
  misc_feature (11)..(12): n is a, c, g, or t
  misc_feature (854)..(854): n is a, c, g, or t
  misc_feature (875)..(875): n is a, c, g, or t
  misc_feature (891)..(892): n is a, c, g, or t
  misc_feature (898)..(898): n is a, c, g, or t
  misc_feature (931)..(931): n is a, c, g, or t
  misc_feature (962)..(962): n is a, c, g, or t
  misc_feature (964)..(964): n is a, c, g, or t
  misc_feature (994)..(994): n is a, c, g, or t
  misc_feature (998)..(1000): n is a, c, g, or t
  misc_feature (1007)..(1007): n is a, c, g, or t
  misc_feature (1011)..(1011): n is a, c, g, or t
  misc_feature (1017)..(1018): n is a, c, g, or t
ccnnnnnnnannagagaaattactatgagaggatcgcatcaccatcaccatcacggatcctatttaggtgacactatagaatcgtcgacccacgcgtccgcggtcgctcaaatgtagcaccgtcgtctgcgtgatctgcttggagaagcccaaataccgctgtccagcctgccgcgtgccctactgctcggtagtctgcttccggaagcacaaagaacagtgcaaccctgaaactcgtcctgttgagaaaaaaataagatcagctcttcctaccaaaaccgtaaagcctgtggaaaacaaagatgatgatgactctatagctgattttctcaatagtgatgaggaagaagacagagtttctttgcagaatttaaagaatttaggggaatctgcaacattaagaagcttattgctcaatccacacctcaggcagttgatggtcaacctcgatcagggagaagacaaagcaaagctcatgagagcttacatgcaagagcctttgtttgtggagtttgcagactgctgtttaggaattgtggagccatcccagaatgaggagtcttaagatggattattgtgctgcttgctcaagcgtgtgcttgactcctggaacctgcctgctccctctcccagaccagctagtttggggctggggagctcaggcaaaagaggtttccaggatgcagattaggtcatgcaggcctttaccggcattgatgtggctcatgtttcaggcagacttggggtccttaaggtggcaagtcctttatggagagaaaacttgacattcagatgattgttttttaaatgttttacttttgggtacagttgaatagacatcataaacgatatcnaagcttacacttcatatgganttaaaacttggtcagnngttaanaaaatcaaaaccgtgattctactgtacattgcnttaatccataatttaaatggtttgaaaattncntttaaataaaatccaccttaatttaaattncctnnnaaaaaanaaanaaaatnna

SEQ ID NO: 98 - DNA, 597 bp, Homo Sapiens
aatagagagaattactatgagaggatcgcatcaccatcaccatcacggatcctatttaggtgacactatagaatcgtcgacccacgcgtccgcggacgcgtgggtaaaaatttttatcaacctaccccgatctatggattttgaagaggcagaaagaagtgaaccaactcaagctctggaactgacagaggatgatattaaagaagatggcattgttccacttcgttatgttaagtttcagaatgttaacagtgtaactatatttgttcagtcgaatcaaggtgaagaggaaacaacaagaatttcatattttacttttattggtactccagtccaggcaacaaatatgaatgacttcaaacgagtagttggcaaaaaaggagaaagccactaaggtacaaaagacactggacaaccatattgcaatcagatctacagctcctggataattgcttgattctcgccagagactgtcaatgtttcattcattgccattaccaataaatcattgcttttgttcagatggtatcactagtgtttccattgtaatcttgacacatgcaattgtaaataaaagtcaccacttttgccaagctt

SEQ ID NO: 99 - DNA, 964 bp, Homo Sapiens
  misc_feature (1)..(1): n is a, c, g, or t
  misc_feature (3)..(3): n is a, c, g, or t
  misc_feature (827)..(827): n is a, c, g, or t
  misc_feature (933)..(933): n is a, c, g, or t
  misc_feature (937)..(937): n is a, c, g, or t
  misc_feature (942)..(942): n is a, c, g, or t
  misc_feature (950)..(950): n is a, c, g, or t
nantagagagaattaactatgagaggatcgcatcaccatcaccatcacggatcctatttaggtgacactatagaatcgtcgacccacgcgatccgcgagcccccgccggcccttcctccagcgccctgcggaccccgcagaaggcgctcgcctccctagcccgcaaaaacatatcgatttttctcgctgtggcaacggggacgtcctgatagatcctctgctccaataggcaactccggccttccctgccctgacctggaacctctgggagggctgcagagtaagtgccgcctctgcgctccgacggaggcacgaggcctgtggagtaggtccctctgttccgacaggtgcgacacttggcgctccatgcttgcgggtgccgggaggcctggcctctgctggttgctctgtgctttcaccttaaagctctgccaagcagaggctcccgtgcaggaagagaagctgtcagcaagcacctcaaatttgccatgctggctggtggaagagtttgtggtagcagaagagtgctctccatgctctaatttccgggctaaaactacccctgagtgtggtcccacaggatatgtagagaaaatcacatgcagctcatctaagagaaatgagttcaaaagctgccgctcagctttgatggaacaacgcttattttggaagttcgaaggggctgtcgtgtgtgtggccctgatcttcgcttgtcttgtcatcattcgtcagcgacaattggacagaaaggctctggaaaaggtccggaagcaaatcgagtccatatagctacattccacccttgtatcctgggtcttaaaagaccntatctcagacagtgaaagtgaaatggactgatttgcactcttggttcttggaaaccttgtggtgaaatccccttttccccatcttcttcttttcagatcattaatngaancaaantaaaaaangataaaaaatggtt

SEQ ID NO: 100 - DNA, 1072 bp, Homo Sapiens
  misc_feature (2)..(3): n is a, c, g, or t
  misc_feature (785)..(785): n is a, c, g, or t
  misc_feature (869)..(869): n is a, c, g, or t
  misc_feature (873)..(873): n is a, c, g, or t
  misc_feature (897)..(897): n is a, c, g, or t
  misc_feature (906)..(906): n is a, c, g, or t
  misc_feature (909)..(909): n is a, c, g, or t
  misc_feature (912)..(913): n is a, c, g, or t
  misc_feature (915)..(915): n is a, c, g, or t
  misc_feature (919)..(919): n is a, c, g, or t
  misc_feature (924)..(924): n is a, c, g, or t
  misc_feature (929)..(929): n is a, c, g, or t
  misc_feature (931)..(931): n is a, c, g, or t
  misc_feature (941)..(941): n is a, c, g, or t
  misc_feature (953)..(953): n is a, c, g, or t
  misc_feature (956)..(956): n is a, c, g, or t
  misc_feature (962)..(962): n is a, c, g, or t
  misc_feature (972)..(972): n is a, c, g, or t
  misc_feature (974)..(974): n is a, c, g, or t
  misc_feature (981)..(981): n is a, c, g, or t
  misc_feature (993)..(993): n is a, c, g, or t
  misc_feature (995)..(995): n is a, c, g, or t
  misc_feature (1013)..(1013): n is a, c, g, or t
  misc_feature (1023)..(1023): n is a, c, g, or t
  misc_feature (1035)..(1035): n is a, c, g, or t
  misc_feature (1050)..(1050): n is a, c, g, or t
  misc_feature (1054)..(1054): n is a, c, g, or t
  misc_feature (1059)..(1059): n is a, c, g, or t
  misc_feature (1062)..(1062): n is a, c, g, or t
  misc_feature (1068)..(1068): n is a, c, g, or t
  misc_feature (1070)..(1070): n is a, c, g, or t
anngagaaattactatgagaggatcgcatcaccatcaccatcacggatcctatttaggtgacactatagaatcgtcgacccacgcgtccgatttgcagaaacagcgagaacttcaaaaagccaatcaggagcagtatgcagaggggaagatgagaggggctgccccaggaaagaagacatctggtctgcaacagaaaaatgttgaagtgaaaacgaaaaagaacaaacagaaaacacctggaaatggagatggtggcagtaccagtgagacccctcagcctcctcggaagaaaagggcccgggtagatcctactgttgaaaatgaggaaacattcatgaacagagttgaagttaaagtaaagattcctgaagagctaaaaccgtggcttgttgatgactgggacttaattaccaggcaaaaacagctcttttatcttcctgccaagaagaatgtggattccattcttgaggattatgcaaattacaagaaatctcgtggaaacacagataataaggagtatgcggttaatgaagttgtggcagggataaaagaatacttcaacgtaatgttgggtacccagctactctataaatttgagagaccacagtatgctgaaattcttgcagatcatcccgatgcacccatgtcccaggtgtatggagcgccacatctcctgagattatttgtacgaattggagcaatgttggcttatacacctctggatgagaagagccttgctttattactcaattatcttcacgatttcctaaagtacctggcaaanaattctgcaactttgttcagtgccagcgattatgaagtggctcctcctgagtaccatcggaaagctgtgtgagaggcactctcnctcncttatgtttggatctccgtaaacncatttttgntcntanncnatcncttgnacaancnatgtgctttngaaaatgtttantgnataacnattgaggttngntttccgnttggattttaancnaaaaaataaaaagggggnaaaacccccnttttcccccctnccttttttttttccnttcnaaatngcngcccgngntt

SEQ ID NO: 101 - DNA, 1211 bp, Homo Sapiens
  misc_feature (601)..(601): n is a, c, g, or t
  misc_feature (850)..(850): n is a, c, g, or t
  misc_feature (853)..(853): n is a, c, g, or t
  misc_feature (876)..(877): n is a, c, g, or t
  misc_feature (894)..(894): n is a, c, g, or t
  misc_feature (900)..(900): n is a, c, g, or t
  misc_feature (906)..(906): n is a, c, g, or t
  misc_feature (927)..(927): n is a, c, g, or t
  misc_feature (929)..(929): n is a, c, g, or t
  misc_feature (944)..(944): n is a, c, g, or t
  misc_feature (950)..(950): n is a, c, g, or t
  misc_feature (973)..(973): n is a, c, g, or t
  misc_feature (1004)..(1004): n is a, c, g, or t
  misc_feature (1010)..(1010): n is a, c, g, or t
  misc_feature (1016)..(1016): n is a, c, g, or t
  misc_feature (1018)..(1018): n is a, c, g, or t
  misc_feature (1023)..(1023): n is a, c, g, or t
  misc_feature (1027)..(1028): n is a, c, g, or t
  misc_feature (1033)..(1033): n is a, c, g, or t
  misc_feature (1045)..(1045): n is a, c, g, or t
  misc_feature (1049)..(1049): n is a, c, g, or t
  misc_feature (1063)..(1063): n is a, c, g, or t
  misc_feature (1071)..(1071): n is a, c, g, or t
  misc_feature (1076)..(1077): n is a, c, g, or t
  misc_feature (1081)..(1081): n is a, c, g, or t
  misc_feature (1087)..(1087): n is a, c, g, or t
  misc_feature (1102)..(1102): n is a, c, g, or t
  misc_feature (1109)..(1109): n is a, c, g, or t
  misc_feature (1115)..(1115): n is a, c, g, or t
  misc_feature (1120)..(1120): n is a, c, g, or t
  misc_feature (1124)..(1124): n is a, c, g, or t
  misc_feature (1126)..(1126): n is a, c, g, or t
  misc_feature (1130)..(1131): n is a, c, g, or t
  misc_feature (1136)..(1136): n is a, c, g, or t
  misc_feature (1142)..(1142): n is a, c, g, or t
  misc_feature (1149)..(1149): n is a, c, g, or t
  misc_feature (1162)..(1162): n is a, c, g, or t
  misc_feature (1175)..(1175): n is a, c, g, or t
  misc_feature (1200)..(1200): n is a, c, g, or t
  misc_feature (1204)..(1204): n is a, c, g, or t
tagagaaattactatgagaggatcgcatcaccatcaccatcacggatcctatttaggtgacactatagaatcgtcgacccacgcgtccgcccggacggcgcctctcgaacgagtgtgggcgcgaggcaggatgacgacctcaggcgcgctctttccaagcctggtgccaggctctcggggcgcctccaacaagtacttggtggagtttcgggcgggaaagatgtccctgaaggggaccaccgtgactccggataagcggaaagggctggtgtacattcagcagacggacgactcgcttattcacttctgctggaaggacaggacgtccgggaacgtggaagacgacttgatcatcttccctgacgactgtgagttcaagcgggtgccgcagtgccccagcgggagggtctacgtgctgaagttcaaggcagggtccaagcggcttttcttctggatgcaggaacccaagacagaccaggatgaggagcattgccggaaagtcaacgagtatctgaacaaccccccgatgcctggggcactgggggccagcggaagcagcggccacgaactctctgcgctaggcggtgagggtggcctgcanagcctgctgggaaacatgagccacagccagctcatgcagctcatcggaccagccggcctcggaggactgggtaacgtgcgccacccgggctctcgggcagcttctgctgggaatgctttgaggcccggtctctggtttcctttaaacttctgctggctctgtctgcgtaatgtcggggaacctgtgtgtccgcaagctggttcccctttgggaatgcgcttgtttgccctgtggctaaaacctgggtangcnaaggccttcttgggccccttgtnnaagaaccccagcttggntacttncaaaanaaaggttggctggcccaaacngntgggggccttgaagnaactgnaaaggaaacttggggttccctgncccccttgggtccccctgggcccccaatggntgcctngcctgntngccanattnntggantggaaaaacccntgtngctttggccccctncaaaaaangtttnncccntttggngggggaatctgggantgaaatnttttcnatctnaaancnattnnaattnttttantgggganggaaaaaaaaaantaacctttttttnccaaaaaaaaacccccaagtttccncccncccccat

SEQ ID NO: 102 - DNA, 1390 bp, Homo Sapiens
  misc_feature (921)..(921): n is a, c, g, or t
  misc_feature (945)..(945): n is a, c, g, or t
  misc_feature (948)..(948): n is a, c, g, or t
  misc_feature (1002)..(1002): n is a, c, g, or t
  misc_feature (1005)..(1005): n is a, c, g, or t
  misc_feature (1015)..(1015): n is a, c, g, or t
  misc_feature (1021)..(1021): n is a, c, g, or t
  misc_feature (1036)..(1036): n is a, c, g, or t
  misc_feature (1047)..(1047): n is a, c, g, or t
  misc_feature (1050)..(1050): n is a, c, g, or t
  misc_feature (1055)..(1055): n is a, c, g, or t
  misc_feature (1064)..(1064): n is a, c, g, or t
  misc_feature (1070)..(1070): n is a, c, g, or t
  misc_feature (1075)..(1075): n is a, c, g, or t
  misc_feature (1077)..(1077): n is a, c, g, or t
  misc_feature (1106)..(1106): n is a, c, g, or t
  misc_feature (1116)..(1116): n is a, c, g, or t
  misc_feature (1125)..(1125): n is a, c, g, or t
  misc_feature (1133)..(1133): n is a, c, g, or t
  misc_feature (1136)..(1136): n is a, c, g, or t
  misc_feature (1144)..(1144): n is a, c, g, or t
  misc_feature (1147)..(1147): n is a, c, g, or t
  misc_feature (1156)..(1156): n is a, c, g, or t
  misc_feature (1189)..(1189): n is a, c, g, or t
  misc_feature (1194)..(1196): n is a, c, g, or t
  misc_feature (1217)..(1217): n is a, c, g, or t
  misc_feature (1221)..(1221): n is a, c, g, or t
  misc_feature (1224)..(1224): n is a, c, g, or t
  misc_feature (1226)..(1226): n is a, c, g, or t
  misc_feature (1234)..(1234): n is a, c, g, or t
  misc_feature (1244)..(1244): n is a, c, g, or t
  misc_feature (1248)..(1248): n is a, c, g, or t
  misc_feature (1283)..(1283): n is a, c, g, or t
  misc_feature (1293)..(1293): n is a, c, g, or t
  misc_feature (1296)..(1298): n is a, c, g, or t
  misc_feature (1302)..(1302): n is a, c, g, or t
  misc_feature (1306)..(1306): n is a, c, g, or t
  misc_feature (1320)..(1320): n is a, c, g, or t
  misc_feature (1328)..(1329): n is a, c, g, or t
  misc_feature (1332)..(1332): n is a, c, g, or t
  misc_feature (1343)..(1343): n is a, c, g, or t
  misc_feature (1345)..(1345): n is a, c, g, or t
  misc_feature (1349)..(1349): n is a, c, g, or t
  misc_feature (1352)..(1352): n is a, c, g, or t
  misc_feature (1365)..(1365): n is a, c, g, or t
  misc_feature (1370)..(1370): n is a, c, g, or t
  misc_feature (1376)..(1377): n is a, c, g, or t
  misc_feature (1379)..(1379): n is a, c, g, or t
  misc_feature (1381)..(1381): n is a, c, g, or t
agagaaattactatgagaggatcgcatcaccatcaccatcacggatcctatttaggtgacactatagaatcgtcgacccacgcgtccgagactttgcttcccgaagatactcagaaacttgacaatttcctaggagaagtcagagacaaatgggatactgtttgtggcaagtctgtggagcggcagcacaagttggaggaagccctgctcttttcgggtcagttcatggatgctttgcaggcattggttgactggttatacaaggtggagccacagctggctgaggaccagcccgtgcacggggaccttgacctcgtcatgaacctcatggatgcacacaaggttttccagaaggaactgggaaagcgaacaggaaccgttcaggtcctgaagcggtcaggccgagagctgattgagaatagtcgagatgacaccacttgggtaaaaggacagctccaggaactgagcactcgctgggacactgtctgtaaactctctgtttccaaacaaagccggcttgagcaggccttaaaacaagcggaagtgtttcgagacacagtccacatgctgttggagtggctttctgaagcagagcaaacgcttcgctttcggggagcacttcctgatgacacagaggccctgcagtctctcattgacacccataaggaattcatgaagaaagtagaagaaaagcgagtggacgttaactcagcagtagccatgggagaagtcatcctggctgtctgccaccccgattgcatcacaaccatcaaacactggatcaccatcatccgagctcgcttcgaggaggtcctgacatgggctaagcagcaccagcagcgtcttgaaacggccttgtcagaactggtggctaatgctgagctcctggaagaacttctggcatggatccagtgggctganacccccctcattcagcgggatcanganccaatccgcaaaacattgaccgagttaaagccctttatcgctgaacatcaaacnttntgggaggaangactcncaaacagcctgacgnggaccgggtcnccnagacntcaaaaggnaaaacntaaancntactcccccccctttcaaaaaaaatcccncagggaagcnggaaatccntaagtcanccnaccccccnccntgccaatcntttcaagtctgaaaaaaaaacccggaaaaaccnctttnnncccctgggaaaagggggggtnttanccngnccgcaaanaaataaagancctngatcccggaaaataaaattccccttttttttcggnaaaaaattgnttnnnaaanaaancccgggaatttccnccctttannccngggaaaacccngntttnggntttcccccccccnaaaangggggnntncnagggggttt

SEQ ID NO: 103 - DNA, 1188 bp, Homo Sapiens
  misc_feature (858)..(858): n is a, c, g, or t
  misc_feature (860)..(860): n is a, c, g, or t
  misc_feature (896)..(896): n is a, c, g, or t
  misc_feature (960)..(960): n is a, c, g, or t
  misc_feature (1006)..(1006): n is a, c, g, or t
  misc_feature (1037)..(1037): n is a, c, g, or t
  misc_feature (1042)..(1042): n is a, c, g, or t
  misc_feature (1056)..(1056): n is a, c, g, or t
  misc_feature (1061)..(1062): n is a, c, g, or t
  misc_feature (1066)..(1066): n is a, c, g, or t
  misc_feature (1093)..(1093): n is a, c, g, or t
  misc_feature (1095)..(1095): n is a, c, g, or t
  misc_feature (1098)..(1098): n is a, c, g, or t
  misc_feature (1105)..(1105): n is a, c, g, or t
  misc_feature (1117)..(1118): n is a, c, g, or t
  misc_feature (1122)..(1122): n is a, c, g, or t
  misc_feature (1124)..(1124): n is a, c, g, or t
  misc_feature (1129)..(1129): n is a, c, g, or t
  misc_feature (1141)..(1141): n is a, c, g, or t
  misc_feature (1149)..(1149): n is a, c, g, or t
  misc_feature (1151)..(1151): n is a, c, g, or t
  misc_feature (1156)..(1156): n is a, c, g, or t
  misc_feature (1159)..(1159): n is a, c, g, or t
  misc_feature (1166)..(1166): n is a, c, g, or t
  misc_feature (1174)..(1175): n is a, c, g, or t
  misc_feature (1178)..(1178): n is a, c, g, or t
  misc_feature (1184)..(1184): n is a, c, g, or t
  misc_feature (1187)..(1188): n is a, c, g, or t
gagagattactatgagaggatcgcatcaccatcaccatcacggatcctatttaggtgacactatagaatcgtcgacccacgcgtccgcggacgcgtgggcggacgcgtgggtgtgggggccaccaacgtgggctccattcgcatctactttgaccgggacctgcacacaaacagcccaaggcacagcaagggctcctacaatgacttcagcttcgtgacgcacaccaatagagagggcgtccccatgcgtaagggcgagcacctgggcgagttcaacctgggctccaccatcgtgctcatcttcgaggcccccaaggacttcaatttccagctgaaaacaggacagaaaatccgctttggggaagccctgggctcgctctagagtctctttcctgattatggctgctaagggatcttttccaaacagagtgagggtcttttcaagagggaggcccatgaggccatccaggtaagggcctgcctcagcgtggttgggagtctgaccaggtaggacttgaatgattcggctaccacctgttccagaggtgcagacaagaggtggcgagagcccccatcatgcccctcaacctatcccgttccttctgcctacaaataaaaagtgcaggctggaatgatctcagtcacatttggatctttttaaacactgtatagacggaagagcctgcattcctgaccgaaccttcagttggtctcggttgtcgtttttttcttgctgctcctccccccatcacctgagctgttttctgttggccccttttgttttttggccttaacgctcctgctgcacagggtgaggtgcctccttggcacagactgtggatgcctctcccccagcananccacacagccttcgtgacaactgctttccgttcccnattcacctcatcctgctcttaaaaaaagcagtctttgtgcttgtggctgaacgcatcaccctgnactctgctagtgtcttctgaggacctgatgaaactgattaatgaanaaactttgcaggacctgatgaatgacccttntgganctggccaggtcctntgcannaggnaaaacaatcaatccttgaacctgcctntnggnccaaatnaaaagggcaggnngtanangcccnctgggaaaaggnaaaatccntnccccnccnaattccnaatgaaannggnaaattntcnn

SEQ ID NO: 104 - DNA, 1136 bp, Homo Sapiens
  misc_feature (543)..(543): n is a, c, g, or t
  misc_feature (731)..(731): n is a, c, g, or t
  misc_feature (765)..(765): n is a, c, g, or t
  misc_feature (856)..(856): n is a, c, g, or t
  misc_feature (892)..(892): n is a, c, g, or t
  misc_feature (898)..(898): n is a, c, g, or t
  misc_feature (900)..(900): n is a, c, g, or t
  misc_feature (905)..(905): n is a, c, g, or t
  misc_feature (916)..(916): n is a, c, g, or t
  misc_feature (924)..(924): n is a, c, g, or t
  misc_feature (929)..(929): n is a, c, g, or t
  misc_feature (934)..(934): n is a, c, g, or t
  misc_feature (936)..(936): n is a, c, g, or t
  misc_feature (950)..(950): n is a, c, g, or t
  misc_feature (972)..(972): n is a, c, g, or t
  misc_feature (982)..(982): n is a, c, g, or t
  misc_feature (987)..(987): n is a, c, g, or t
  misc_feature (991)..(991): n is a, c, g, or t
  misc_feature (1004)..(1004): n is a, c, g, or t
  misc_feature (1017)..(1017): n is a, c, g, or t
  misc_feature (1020)..(1020): n is a, c, g, or t
  misc_feature (1029)..(1029): n is a, c, g, or t
  misc_feature (1037)..(1037): n is a, c, g, or t
  misc_feature (1049)..(1049): n is a, c, g, or t
  misc_feature (1067)..(1067): n is a, c, g, or t
  misc_feature (1072)..(1072): n is a, c, g, or t
  misc_feature (1075)..(1075): n is a, c, g, or t
  misc_feature (1077)..(1077): n is a, c, g, or t
  misc_feature (1079)..(1079): n is a, c, g, or t
  misc_feature (1083)..(1083): n is a, c, g, or t
  misc_feature (1092)..(1092): n is a, c, g, or t
  misc_feature (1096)..(1096): n is a, c, g, or t
  misc_feature (1107)..(1107): n is a, c, g, or t
  misc_feature (1119)..(1119): n is a, c, g, or t
  misc_feature (1123)..(1123): n is a, c, g, or t
  misc_feature (1125)..(1126): n is a, c, g, or t
  misc_feature (1135)..(1135): n is a, c, g, or t
tagagaaattactatgagaggatcgcatcaccatcaccatcacgggatcctatttaggtgacactatagaatcgtcgacccacgcgtccggagaatggcggcagctgggcgagctgcttaccgacggcgtccgcagcttccgcgagccagctcccgcggaggccctgccccagcagtacccagagccggcccctgcggctctctgtggcccacccccgcgagccccatcccggaacctggcgcccacgccgcgccgtcgcaaggcatcccccgagccggagggcgaggcggctgggaagatgaccaccgaggagcagcagcaacggcactgggtggcacccggcggcccgtactccgctgagacccctggtgtgccctcgcccattgccgccctgaagaatgtggccgaagccctgggccactcacccaaggaccctggcggaggcggggggcctgtgcgtgcagggggcgccagccctgcagcctcctccacggcccagccgccaacccagcatcgccttgtggcccgcaacggcgaagcanaagtcagtcccacagcgggggccgaagctgtcagcgggggtggcagcggcactggggcgacccctggggcccccctgtgctgtaccctgtgcagggagcggctagaagacacccacttcgtccagtgcccctcggtgcccggacacaagttctgctttccctgctcccgggagttcatcaaggcgcanggcccggccggggaggtgtactgcccgagcgganacaagtgcccgctggtcggctcctccgtgccctgggccttcatgcaagggcgagatcgccaccatccttgctggaaaaaatcaaagttaanaaaaaaacgggaaccccttaggctaccaactgcctnccaggntnactgnccctctgcccnttttgccnacccnaccgntngccgcggaaaaaanttattccctcccccgaaccaancccaatggcnacctntatnttgggtaaataantccctttcttcanccnaaatgggtnccttgggntaaaatcttttngggttggggggaaaaaantttgnggntncntgtncaaagggtntttngggttccttgncccctcaatttncctntnncccccttgnt

SEQ ID NO: 105 - DNA, 1184 bp, Homo Sapiens
  misc_feature (1)..(2): n is a, c, g, or t
  misc_feature (872)..(872): n is a, c, g, or t
  misc_feature (876)..(876): n is a, c, g, or t
  misc_feature (879)..(879): n is a, c, g, or t
  misc_feature (903)..(903): n is a, c, g, or t
  misc_feature (967)..(967): n is a, c, g, or t
  misc_feature (973)..(973): n is a, c, g, or t
  misc_feature (975)..(975): n is a, c, g, or t
  misc_feature (1015)..(1015): n is a, c, g, or t
  misc_feature (1024)..(1024): n is a, c, g, or t
  misc_feature (1033)..(1033): n is a, c, g, or t
  misc_feature (1059)..(1059): n is a, c, g, or t
  misc_feature (1061)..(1061): n is a, c, g, or t
  misc_feature (1064)..(1064): n is a, c, g, or t
  misc_feature (1070)..(1070): n is a, c, g, or t
  misc_feature (1082)..(1082): n is a, c, g, or t
  misc_feature (1103)..(1103): n is a, c, g, or t
  misc_feature (1111)..(1111): n is a, c, g, or t
  misc_feature (1114)..(1114): n is a, c, g, or t
  misc_feature (1117)..(1117): n is a, c, g, or t
  misc_feature (1119)..(1119): n is a, c, g, or t
  misc_feature (1122)..(1123): n is a, c, g, or t
  misc_feature (1126)..(1126): n is a, c, g, or t
  misc_feature (1130)..(1130): n is a, c, g, or t
  misc_feature (1148)..(1148): n is a, c, g, or t
  misc_feature (1152)..(1152): n is a, c, g, or t
  misc_feature (1155)..(1155): n is a, c, g, or t
  misc_feature (1157)..(1158): n is a, c, g, or t
  misc_feature (1160)..(1160): n is a, c, g, or t
  misc_feature (1180)..(1180): n is a, c, g, or t
nntagagaaattactatgagaggatcgcatcaccatcaccatcacggatcctatttaggtgacactatagaatcgtcgacccacgcgtccgcgacaaccccaaggagcggggcttctggtacgacgcggagatctccaggaagcgcgagaccaggacggcgcgggaactctacgccaacgtggtgctgggggatgattctctgaacgactgtcggatcatcttcgtggacgaagtcttcaagattgagcggccgggtgaagggagccccatggttgacaaccccatgagacggaagagcgggccgtcctgcaagcactgcaaggacgacgtgaacagactctgccgggtctgcgcctgccacctgtgcgggggccggcaggaccccgacaagcagctcatgtgcgatgagtgcgacatggccttccacatctactgcctggacccgcccctcagcagtgttcccagcgaggacgagtggtactgccctgagtgccggaatgatgccagcgaggtggtactggcgggagagcggctgagagagagcaagaagaaggcgaagatggcctcggccacatcgtcctcacagcgggactggggcaagggcatggcctgtgtgggccgcaccaaggaatgtaccatcgtcccgtccaaccactacggacccatcccggggatccccgtgggcaccatgtggcggttccgagtccaggtcagcgagtcgggtgtccatcggccccacgtggctggcatacacggccggagcaacgacggagcgtactccctagtcctggcggggggctatgaggatgacgtggaccatgggaaattttttcacatacacgggtagtggtggtcgagatctttccggcancaanagnaccgcggaacagtcttgtgatcanaaactcaccaacaccaacagggcgctggctctcaactgctttgctcccatcaatgaccaaaaangggccnangccaagaactggcggtcgggaaaccggtcagggtggtgcncattgtcanggtggcaanaaaacaagtacccccccctgaggcancnctntgatgncatctaaaggtnggaaaaactggcccaaaaggnaatccggnttntcngnggnnctncttntgcgaaggaaaaaaaaanctgnccntnnanaaagaagggaaagaccgatnaaaa

SEQ ID NO: 106 - DNA, 1224 bp, Homo Sapiens
  misc_feature (844)..(844): n is a, c, g, or t
  misc_feature (877)..(877): n is a, c, g, or t
  misc_feature (896)..(896): n is a, c, g, or t
  misc_feature (901)..(901): n is a, c, g, or t
  misc_feature (914)..(914): n is a, c, g, or t
  misc_feature (919)..(919): n is a, c, g, or t
  misc_feature (951)..(951): n is a, c, g, or t
  misc_feature (969)..(969): n is a, c, g, or t
  misc_feature (975)..(975): n is a, c, g, or t
  misc_feature (977)..(977): n is a, c, g, or t
  misc_feature (979)..(979): n is a, c, g, or t
  misc_feature (993)..(993): n is a, c, g, or t
  misc_feature (998)..(998): n is a, c, g, or t
  misc_feature (1020)..(1020): n is a, c, g, or t
  misc_feature (1029)..(1029): n is a, c, g, or t
  misc_feature (1037)..(1038): n is a, c, g, or t
  misc_feature (1043)..(1043): n is a, c, g, or t
  misc_feature (1050)..(1050): n is a, c, g, or t
  misc_feature (1053)..(1053): n is a, c, g, or t
  misc_feature (1072)..(1072): n is a, c, g, or t
  misc_feature (1084)..(1084): n is a, c, g, or t
  misc_feature (1092)..(1092): n is a, c, g, or t
  misc_feature (1098)..(1098): n is a, c, g, or t
  misc_feature (1100)..(1100): n is a, c, g, or t
  misc_feature (1108)..(1108): n is a, c, g, or t
  misc_feature (1120)..(1122): n is a, c, g, or t
  misc_feature (1125)..(1125): n is a, c, g, or t
  misc_feature (1129)..(1129): n is a, c, g, or t
  misc_feature (1136)..(1136): n is a, c, g, or t
  misc_feature (1143)..(1143): n is a, c, g, or t
  misc_feature (1155)..(1155): n is a, c, g, or t
  misc_feature (1165)..(1166): n is a, c, g, or t
  misc_feature (1168)..(1168): n is a, c, g, or t
  misc_feature (1171)..(1171): n is a, c, g, or t
  misc_feature (1200)..(1201): n is a, c, g, or t
  misc_feature (1209)..(1209): n is a, c, g, or t
  misc_feature (1211)..(1211): n is a, c, g, or t
  misc_feature (1213)..(1213): n is a, c, g, or t
tagagaaattactatgagaggatcgcatcaccatcaccatcacggatcctatttaggtgacactatagaatcgtcgacccacgcgtccgtgaagacagtgtctctgcgcagtgaggagaccgtgtcgggcctcaaaggctacgtggccgccgggacctgcctcatgcagggggaggaggtcacgtgccgagggcggatcttgatcatggatgtgattgaggtggtgcccgagcctggccagcccttgaccaagaacaagttcaaagtcctttacgagaaggagcagaaggggcccgtgaccgccctgtgccactgcaatggccacctggtgtcggccatcggccagaagattttcctgtggagcctgcgggccagcgagctgacgggcatggccttcatcgacacgcagctctacatacaccagatgatcagcgtcaagaacttcatcctggcagccgacgtcatgaagagcatttcgctgctgcgctaccaggaggaaagcaagacgctgagcctggtgtcgcgggatgccaagcccctggaggtgtacagcgtggacttcatggtggacaatgcccagctgggttttctggtgtctgaccgcgaccgcaacctcatggtgtacatgtacctgcccgaagccaaggagagtttcgggggcatgcgcctgctgcgtcgggcagacttccacgtgggtgcccacgtgaacacgttctggaggaccccgtgccggggggccactgaagggctcagcaaaaagtcggtcgtgtgggagaataagcacatcacgtggtttgccaccctggacggcggcatcgggctgctgctgcccatgcaggaaaanacctaccggcggctgctgatgctgcaaaacgcnctgaccaccatgctgccanaccangccgggcttcaanccccngcgccttccggaatgctgcacgtggaccgccnccaccctccaaaatgccntgcccnancntgctggaatggggnaactngctcaaccccctacctgttacntgaacaccnttggaacnncaccnagcttanccnaaaaaaatcggcccccccncccaaaaaatantcctgganaaattntntggaaaanggaacccgggtnnnccncccnatttttnaaccccnggggaatgccgntcccccccanncnaangggaaataccctccccccccccttttttnnaaaaaacnangnaaaaaaatttt

SEQ ID NO: 107 - DNA, 1288 bp, Homo Sapiens
  misc_feature (896)..(896): n is a, c, g, or t
  misc_feature (920)..(920): n is a, c, g, or t
  misc_feature (957)..(957): n is a, c, g, or t
  misc_feature (972)..(972): n is a, c, g, or t
  misc_feature (994)..(994): n is a, c, g, or t
  misc_feature (1001)..(1001): n is a, c, g, or t
  misc_feature (1011)..(1013): n is a, c, g, or t
  misc_feature (1022)..(1022): n is a, c, g, or t
  misc_feature (1025)..(1025): n is a, c, g, or t
  misc_feature (1031)..(1031): n is a, c, g, or t
  misc_feature (1085)..(1085): n is a, c, g, or t
  misc_feature (1107)..(1107): n is a, c, g, or t
  misc_feature (1115)..(1115): n is a, c, g, or t
  misc_feature (1121)..(1121): n is a, c, g, or t
  misc_feature (1128)..(1128): n is a, c, g, or t
  misc_feature (1140)..(1140): n is a, c, g, or t
  misc_feature (1144)..(1144): n is a, c, g, or t
  misc_feature (1152)..(1152): n is a, c, g, or t
  misc_feature (1156)..(1156): n is a, c, g, or t
  misc_feature (1163)..(1163): n is a, c, g, or t
  misc_feature (1166)..(1166): n is a, c, g, or t
  misc_feature (1171)..(1171): n is a, c, g, or t
  misc_feature (1182)..(1182): n is a, c, g, or t
  misc_feature (1193)..(1193): n is a, c, g, or t
  misc_feature (1198)..(1199): n is a, c, g, or t
  misc_feature (1202)..(1202): n is a, c, g, or t
  misc_feature (1207)..(1207): n is a, c, g, or t
  misc_feature (1210)..(1210): n is a, c, g, or t
  misc_feature (1219)..(1219): n is a, c, g, or t
  misc_feature (1227)..(1227): n is a, c, g, or t
  misc_feature (1229)..(1230): n is a, c, g, or t
  misc_feature (1233)..(1233): n is a, c, g, or t
  misc_feature (1260)..(1260): n is a, c, g, or t
  misc_feature (1262)..(1262): n is a, c, g, or t
  misc_feature (1280)..(1280): n is a, c, g, or t
attagagaaattactatgagaggatcgcatcaccatcaccatcacggatcctatttaggtgacactatagaatcgtcgacccacgcgtccggaagcggcggcaggaggaggtgtgcgacgacccggaggagctgcgggggaaggtccgggagctggccagcgccgtccggaacgccaaatacttggtcgtctacacaggcgcgggaatcagcacggcagcgtctatcccagactaccggggccctaatggagtgtggacactgcttcagaaagggagaagcgttagtgctgccgacctgagcgaggccgagccaaccctcacccacatgagcatcacccgtctgcatgagcagaagctggtgcagcatgtggtgtctcagaactgtgacgggctccacctgaggagtgggctgccgcgcacggccatctccgagctccacgggaacatgtacattgaagtctgtacctcctgcgttcccaacagggagtacgtgcgggtgttcgatgtgacggagcgcactgccctccacagacaccagacaggccggacctgccacaagtgtgggacccagctgcgggacaccattgtgcactttggggagagggggacgttggggcagcctctgaactgggaagcggcgaccgaggctgccagcagagcagacaccatcctgtgtctagggtccagcctgaaggttctaaagaagtacccacgcctctggtgcatgaccaagccccctagccggcggccgaagctttacatcgtgaacctgcagtggaccccgaaggatgactgggctgccctgaagctacatgggaagtgtgatgacgtcatgcggctcctcatggccgaactgggcttggagatccccgcctatagcagggtcttatagggnaatcaataacttcttttaatcaanggttcaagaaattaaggatcccttcaccttctgggcntggcacttttgtggnaagatccattttctcactggcnactcccntgcgtgctgnnnaaaaagcanccncattcngaaattcctttgcaaaaacaaaaaaaaagccccccctgggaccggggtgccccncttaactcggcccccatcctanggggctgntttggnagggctncccaaaaccccnaaangaaaaaanggcntatcccntgncccanaaaaaaaattngccttttcaanggccnnttnccggnaangtgggtttncccccggntnnggnaaaaaacttttgggaaaaatttttccngnaatttttccttttcttanaaaccctt

SEQ ID NO: 108 - DNA, 921 bp, Homo Sapiens
  misc_feature (833)..(833): n is a, c, g, or t
  misc_feature (897)..(898): n is a, c, g, or t
  misc_feature (900)..(903): n is a, c, g, or t
  misc_feature (905)..(921): n is a, c, g, or t
agagaaattactatgagaggatcgcatcaccatcaccatcacggatcctatttaggtgacactatagaatcgtcgacccacgcgtccgtggcaggcagccggctggaaaccgtagggagcatcttctctcggactcgggacctggttcgggccggggtgctgaaggagaagcccctgtggtttgacgtatatgacgcctttcccccgctgagggagcccgtcttccaaaggcctcgagtgcgatatggcaaagccaaagctcccatccaagacatctggtaccacgaggatcggattagagcgaagttttattcagtgtatgggtctggtcaaagagcttttgatctattcaatccaaacttcaagtctacctgtcaacggtttgtggagaagtacactgagctacagaaacttggagaaacagatgaagagaagttatttgtggaaacagggaaggctttattggcagaaggtgtcattttaagacgagtaggcgaagcaaggactcaacacggaggtagtcacgtttcccggaaatccgaacacttgagtgtcagaccacagactgcgttggaagaaaacgagactcagaaagaagttccacaggaccagcatttggaggcacctgcagaccagtcgaaaggtctcttgcctccctgaaggacctgtatactgtgtatgctggcattcacactctactcactggctgaatgttgagctatttttaaacagttgaactgtgtaaatgtttcttgatctctaaggtattatgtttgccttctcttagttatttctgggttgtcacaaagctcagtatcatggtttgacagaancagttatgtgaacttttatgttaggacattactaaataaagaattccctagctgcttataaaannannnnannnnnnnnnnnnnnnnn

SEQ ID NO: 109 - DNA, 1179 bp, Homo Sapiens
  misc_feature (868)..(868): n is a, c, g, or t
  misc_feature (890)..(890): n is a, c, g, or t
  misc_feature (929)..(929): n is a, c, g, or t
  misc_feature (998)..(998): n is a, c, g, or t
  misc_feature (1007)..(1007): n is a, c, g, or t
  misc_feature (1021)..(1021): n is a, c, g, or t
  misc_feature (1030)..(1030): n is a, c, g, or t
  misc_feature (1043)..(1043): n is a, c, g, or t
  misc_feature (1045)..(1045): n is a, c, g, or t
  misc_feature (1052)..(1052): n is a, c, g, or t
  misc_feature (1062)..(1062): n is a, c, g, or t
  misc_feature (1073)..(1073): n is a, c, g, or t
  misc_feature (1079)..(1079): n is a, c, g, or t
  misc_feature (1088)..(1088): n is a, c, g, or t
  misc_feature (1097)..(1097): n is a, c, g, or t
  misc_feature (1113)..(1113): n is a, c, g, or t
  misc_feature (1125)..(1125): n is a, c, g, or t
  misc_feature (1132)..(1132): n is a, c, g, or t
  misc_feature (1144)..(1144): n is a, c, g, or t
  misc_feature (1160)..(1161): n is a, c, g, or t
  misc_feature (1163)..(1163): n is a, c, g, or t
  misc_feature (1165)..(1166): n is a, c, g, or t
tagagaaattactatgagaggatcgcatcaccatcaccatcacggatcctatttaggtgacactatagaatcgtcgacccacgcgtccgatccagtcttgggaacgtactgggacaactgtaaccgttgcacctgccaggagaacaggcagtggcagtgtgaccaagaaccatgcctggtggatccagacatgatcaaagccatcaaccagggcaactatggctggcaggctgggaaccacagcgccttctggggcatgaccctggatgagggcattcgctaccgcctgggcaccatccgcccatcttcctcggtcatgaacatgcatgaaatttatacagtgctgaacccaggggaggtgcttcccacagccttcgaggcctctgagaagtggcccaacctgattcatgagcctcttgaccaaggcaactgtgcaggctcctgggccttctccacagcagctgtggcatccgatcgtgtctcaatccattctctgggacacatgacgcctgtcctgtcgccccagaacctgctgtcttgtgacacccaccagcagcagggctgccgcggtgggcgtctcgatggtgcctggtggttcctgcgtcgccgaggggtggtgtctgaccactgctaccccttctcgggccgtgaacgagacgaggctggccctgcgcccccctgtatgatgcacagccgagccatgggtcggggcaagcgccaggccactgcccactgccccaacagctatgttaataacaatgacatctaccaggtcactcctgtctaccgcctcggctccaacgacaaggagatcatgaaggagctgatggagaatggccctgtccaagccctcatggaggtgcatgangacttcttcctatacaagggangcatctacagccacacgccagtgagccttgggaggccanaaagataccgccggcatgggacccactcagtcaaaatcacaggatggggaaaagaaaaccctgccaaanggaaagacnctcaaatactggantgcggccantcctggggcccancntggggcnaaagggccanttccgcatcgnggcggngtcaatgantgcaaatcnaaacttcttgctggcnttggggccccgnggcatgnaaaaaatggttntcctgaagctgcggcnncncnnggggtccggccgg

SEQ ID NO: 110 - DNA, 1120 bp, Homo Sapiens
  misc_feature (692)..(692): n is a, c, g, or t
  misc_feature (827)..(827): n is a, c, g, or t
  misc_feature (855)..(855): n is a, c, g, or t
  misc_feature (868)..(868): n is a, c, g, or t
  misc_feature (900)..(900): n is a, c, g, or t
  misc_feature (905)..(905): n is a, c, g, or t
  misc_feature (907)..(907): n is a, c, g, or t
  misc_feature (916)..(917): n is a, c, g, or t
  misc_feature (927)..(927): n is a, c, g, or t
  misc_feature (944)..(944): n is a, c, g, or t
  misc_feature (953)..(953): n is a, c, g, or t
  misc_feature (957)..(957): n is a, c, g, or t
  misc_feature (963)..(963): n is a, c, g, or t
  misc_feature (970)..(970): n is a, c, g, or t
  misc_feature (972)..(972): n is a, c, g, or t
  misc_feature (979)..(979): n is a, c, g, or t
  misc_feature (986)..(986): n is a, c, g, or t
  misc_feature (992)..(992): n is a, c, g, or t
  misc_feature (994)..(994): n is a, c, g, or t
  misc_feature (1004)..(1004): n is a, c, g, or t
  misc_feature (1006)..(1006): n is a, c, g, or t
  misc_feature (1008)..(1008): n is a, c, g, or t
  misc_feature (1012)..(1012): n is a, c, g, or t
  misc_feature (1037)..(1037): n is a, c, g, or t
  misc_feature (1044)..(1044): n is a, c, g, or t
  misc_feature (1051)..(1051): n is a, c, g, or t
  misc_feature (1053)..(1053): n is a, c, g, or t
  misc_feature (1064)..(1064): n is a, c, g, or t
  misc_feature (1071)..(1071): n is a, c, g, or t
  misc_feature (1088)..(1088): n is a, c, g, or t
  misc_feature (1091)..(1091): n is a, c, g, or t
  misc_feature (1096)..(1096): n is a, c, g, or t
  misc_feature (1102)..(1102): n is a, c, g, or t
  misc_feature (1108)..(1109): n is a, c, g, or t
  misc_feature (1113)..(1113): n is a, c, g, or t
  misc_feature (1115)..(1115): n is a, c, g, or t
  misc_feature (1117)..(1118): n is a, c, g, or t
tagagaaattactatgagaggatcgcatcaccatcaccatcacggatcctatttaggtgacactatagaatcgtcgacccacgcgtccgggagtctgcgcggcgcggccaggcccggccgaccgcgtctcggtcttcgcgtctgccagcctggctggcagtccgtctgtccatcccgccgcgccggggcagtctaggcggagcgggggctcaggcggcggcggcctcgacgcgagtgagtgtcgtggttggggtgctggacccagagtgcctaccctcgcctgcctgggcctcagtttccacatctgcacaatgggggtgaccatccctgccctgctggctgccaggagcggctgtgagtcttcaggcgtggatgcagcctgggggaagccatagggcgctttcacaggcctggccttcaccatggcgggagggagaccgcatctgaagaggagtttctccatcatcccctgctttgtcttcgtggagtcggtgctgctgggcattgtgatcctgcttgcttaccgcctggagttcacggacaccttccctgtgcacacccagggattcttctgctatgacagtacctacgccaagccctacccagggcctgaggctgccagccgagtgcctcctgctcttgtctacgcactggtcactgccgggcccaccctcacgatcctgctgggaganctggcgcgtgcctttttccctgcaccaccttcagccgtcccagtcatcggggagagcaccatcgtgtctggggcctgctgccgcttcagccccccagtgcggaagctggtccgcttcctgggggtctactccttncggcctcttcaccacgaccatcttcccnaacgcgggggcangtggtgaccggcaatccccacgccacaacttncctgntncgtgtgccnnccccaactanaacgggcccttgggctngcctgccancttnctccgnatcggcnanttccccnaaacggntttgtnantgaacaaggngncntgcncttggcaattcccaaccctcatggnccaccgngggccgngnctttcccttgnaaagaangcggcccctttgccccnaancggtncccctnaaaaannaaantnanntt

SEQ ID NO: 111 - DNA, 1155 bp, Homo Sapiens
  misc_feature (1)..(1): n is a, c, g, or t
  misc_feature (879)..(879): n is a, c, g, or t
  misc_feature (903)..(903): n is a, c, g, or t
  misc_feature (930)..(930): n is a, c, g, or t
  misc_feature (959)..(959): n is a, c, g, or t
  misc_feature (970)..(970): n is a, c, g, or t
  misc_feature (986)..(986): n is a, c, g, or t
  misc_feature (1005)..(1005): n is a, c, g, or t
  misc_feature (1008)..(1008): n is a, c, g, or t
  misc_feature (1033)..(1033): n is a, c, g, or t
  misc_feature (1035)..(1035): n is a, c, g, or t
  misc_feature (1052)..(1052): n is a, c, g, or t
  misc_feature (1063)..(1063): n is a, c, g, or t
  misc_feature (1077)..(1078): n is a, c, g, or t
  misc_feature (1081)..(1081): n is a, c, g, or t
  misc_feature (1083)..(1083): n is a, c, g, or t
  misc_feature (1086)..(1086): n is a, c, g, or t
  misc_feature (1088)..(1088): n is a, c, g, or t
  misc_feature (1106)..(1106): n is a, c, g, or t
  misc_feature (1110)..(1110): n is a, c, g, or t
  misc_feature (1112)..(1112): n is a, c, g, or t
  misc_feature (1115)..(1115): n is a, c, g, or t
  misc_feature (1119)..(1119): n is a, c, g, or t
  misc_feature (1121)..(1121): n is a, c, g, or t
  misc_feature (1124)..(1124): n is a, c, g, or t
  misc_feature (1133)..(1134): n is a, c, g, or t
  misc_feature (1139)..(1139): n is a, c, g, or t
  misc_feature (1155)..(1155): n is a, c, g, or t
naatagagaaattactatgagaggatcgcatcaccatcaccatcacggatcctatttaggtgacactatagaatcgtcgacccacgcgtccgggctgctgcagtgttgtgagttggaagctggggagctcggcatggcggtccccgctgcagccatggggccctcggcgttgggccagagcggccccggctcgatggccccgtggtgctcagtgagcagcggcccgtcgcgctacgtgcttgggatgcaggagctgttccggggccacagcaagacgcgcgagttcctggcgcacagcgccaaggtgcactcggtggcctggagttgcgacgggcgtcgcctagcctcggggtccttcgacaagacggccagcgtcttcttgctggagaaggaccggttggtcaaagaaaacaattatcggggacatggggatagtgtggaccagctttgttggcatccaagtaatcctgacctatttgttacggcgtctggagataaaaccattcgcatctgggatgtgaggactacaaaatgcattgccactgtgaacactaaaggggagaacattaatatctgctggagtcctgatgggcagaccattgctgtaggcaacaaggatgatgtggtgacctttattgatgccaagacacaccgttccaaagcagaagagcagttcaagttcgaggtcaacgaaatctcctggaacaatgacaataatatgttcttcctgacaaatggcaatggttgtatcaacatcctcagctacccagaactgaagcctgtgcagtccatcaacgcccatccttccaactgcatctgtatcaagtttgaccccatggggaagtactttgccacaggaagtgcaaatgctttggtcancctctgggaatgtggatgaattantgtgtgttcggtgcttttccaggctgnattggcctgtaaaaacccctcattttcanccatgatgggnaaaatgctggcgtcancatcggaaaaatcattttnatnaaatttcttgaaatggaaacagggnanaaactatgggaaggtanagtgtgaattntccaaccttcaaannggngnggncnccccaaaaaggcctttgntggnanttncctntnaanaaaaaaacnncaaanttaaaacccacccggn

SEQ ID NO: 112 - DNA, 1133 bp, Homo Sapiens
  misc_feature (2)..(2): n is a, c, g, or t
  misc_feature (763)..(763): n is a, c, g, or t
  misc_feature (808)..(808): n is a, c, g, or t
  misc_feature (835)..(835): n is a, c, g, or t
  misc_feature (846)..(846): n is a, c, g, or t
  misc_feature (858)..(858): n is a, c, g, or t
  misc_feature (864)..(864): n is a, c, g, or t
  misc_feature (868)..(868): n is a, c, g, or t
  misc_feature (884)..(884): n is a, c, g, or t
  misc_feature (892)..(892): n is a, c, g, or t
  misc_feature (925)..(925): n is a, c, g, or t
  misc_feature (935)..(935): n is a, c, g, or t
  misc_feature (946)..(946): n is a, c, g, or t
  misc_feature (956)..(956): n is a, c, g, or t
  misc_feature (974)..(974): n is a, c, g, or t
  misc_feature (979)..(979): n is a, c, g, or t
  misc_feature (983)..(983): n is a, c, g, or t
  misc_feature (992)..(992): n is a, c, g, or t
  misc_feature (996)..(996): n is a, c, g, or t
  misc_feature (1005)..(1006): n is a, c, g, or t
  misc_feature (1009)..(1009): n is a, c, g, or t
  misc_feature (1013)..(1013): n is a, c, g, or t
  misc_feature (1016)..(1016): n is a, c, g, or t
  misc_feature (1033)..(1033): n is a, c, g, or t
  misc_feature (1041)..(1041): n is a, c, g, or t
  misc_feature (1043)..(1043): n is a, c, g, or t
  misc_feature (1049)..(1050): n is a, c, g, or t
  misc_feature (1059)..(1059): n is a, c, g, or t
  misc_feature (1061)..(1061): n is a, c, g, or t
  misc_feature (1069)..(1069): n is a, c, g, or t
  misc_feature (1077)..(1077): n is a, c, g, or t
  misc_feature (1082)..(1082): n is a, c, g, or t
  misc_feature (1090)..(1090): n is a, c, g, or t
  misc_feature (1096)..(1096): n is a, c, g, or t
  misc_feature (1100)..(1101): n is a, c, g, or t
  misc_feature (1108)..(1108): n is a, c, g, or t
  misc_feature (1110)..(1110): n is a, c, g, or t
  misc_feature (1114)..(1114): n is a, c, g, or t
  misc_feature (1123)..(1123): n is a, c, g, or t
  misc_feature (1129)..(1129): n is a, c, g, or t
  misc_feature (1132)..(1132): n is a, c, g, or t
anttagagaaattactatgagaggatcgcatcaccatcaccatcacggatcctatttaggtgacactatagaatcgtcgacccacgcgtccgggaaaaagaaaaacgaaaaactgaagcagacaacgtcagcgctggagaagaagatggccggcaggcaaggccgagaggagctcatcaagaaggggctgctggagatgatggagcaggatgctgaaagcaaaacttgcaaccccgatggaggaccccgatctgtacagagtgaaccacccactcccaagtcggagacgctgacttcagaagatgcccagcccggaagccccttggccactgggacggaccaggtctccctggacaagccactgtcctcagctgcccacttggacgatgcagccaagatgccttctgcatccagtggtgaagaagcagacgctggcagcctcctgcccaccaccaatgagctctcccaagccttagctggggctgactccctggacagtcctcccagacctctggagagatccgtgggccagctccccagccccccactgctgcccactccgccacccaaggcaagctccaaaaccacaaaaaatgtcacaggccaagccacactcttccaagcctccagcatgaagagtgccgacccttccctccggggccagctctccacacccacggggtctccgcatctcaccacggtccaccggcctcttcccccaagccgcgtcattgaggagctgcacagggcgctggccacgaancaccgccaggacagttttcaaggaagagaaagtaaagggtctccnaagaagcggctggatgtccgtctgtcnagaacgtccancgtggaacgggncaaagnaaanggaaggaggcttgganctttgacnggggcattggaaaacaagcgaactgccgctaangaatctgagnaaaacaagganaacctgatcnttaattctgaactcaaanacaanttgnttttttatnggancaagaaggnnctnaacnacnccttttttttggaaacnttgccccngnaaatgnnaaaaaggantncctggccntgaaactnaaganccggccanccaacngganntaaaaancngaantttttcccnaaaagnatnt

SEQ ID NO: 113 - DNA, 1043 bp, Homo Sapiens
  misc_feature (1)..(2): n is a, c, g, or t
  misc_feature (850)..(850): n is a, c, g, or t
  misc_feature (928)..(928): n is a, c, g, or t
  misc_feature (951)..(951): n is a, c, g, or t
  misc_feature (989)..(989): n is a, c, g, or t
  misc_feature (992)..(992): n is a, c, g, or t
  misc_feature (998)..(998): n is a, c, g, or t
  misc_feature (1000)..(1001): n is a, c, g, or t
  misc_feature (1035)..(1035): n is a, c, g, or t
  misc_feature (1037)..(1037): n is a, c, g, or t
  misc_feature (1039)..(1039): n is a, c, g, or t
nnatagagaaattactatgagaggatcgcatcaccatcaccatcacggatcctatttaggtgacactatagaatcgtcgacccacgcgtccggggaagcaaggcaagacacacaagggtccacagccaaggaaaaggagtctggaagggagatgatgatgccccacctcacgatgtggccccaccattggatcttctacccccgattaaaggaaaaaaaagtcctgagagccagaagggcgtggacagccctaggacatcagaccacaacagccccccaagtctcccgaacatgagagtgcccaggagggcactgccagcagctcaagaagattccagcgaccctacactgggacacttcttgctgggtccagatggagaaaaagtctgcctgtccctcccagggcatacccaaaccgaggcgcttccatcgggtaaagcctatgaatctgtcaattcaaatatcagccatgaagaggaagggcctagtagtcagcatttcctaaaagagtctcactctgttgtgtccggaaatggtgggttcttggtctcgctgacttcaagaatgaagccgcagaccttcgtgcaaacactgaacctagagccaatcttcacatgaacctttatgaaacctcaccgttgacccaaacaacagagaagcagggagcccagcagtccttggaggcagcagctcagaagacaggagagcctcaaagttgtataaataaagcgctgatatgttcaaacagaaaagaattttacacgcgcaagctgcacatcgacatgacgccgttcctgaaggaaagtggaaatgcactggactatcaggaagaagcagggagacccctcanagaaactcaccacaacgaccaagacccagagccaaggagtatgacccttgactctcccaggggctttcccggactgancacatccagaacccccaaaacanatattgtgcaaaaagtgggcaaaaaattatgatgtacnccncctacncnnaggacttctgggaatacgggcctgaaatcccccnananggtt

SEQ ID NO: 114 - DNA, 1021 bp, Homo Sapiens
  misc_feature (1)..(1): n is a, c, g, or t
  misc_feature (920)..(920): n is a, c, g, or t
  misc_feature (936)..(936): n is a, c, g, or t
  misc_feature (965)..(965): n is a, c, g, or t
  misc_feature (994)..(994): n is a, c, g, or t
  misc_feature (999)..(1021): n is a, c, g, or t
naatagagaaattactatgagaggatcgcatcaccatcaccatcacggatcctatttaggtgacactatagaatcgtcgacccacgcgtccgccactggctacaatgatcgtgctgtattggagagagaagtccaatacactctggaaatgattaaactagtaccacataatgaaagtgcatggaactatttgaaagggattttgcaggatcgtggtctttccaaatatcctaatctgttaaatcaattacttgatttacaaccaagtcatagttccccctacctaattgcctttcttgtggatatctatgaagacatgctagaaaatcagtgtgacaataaggaagacattcttaataaagcattagagttatgtgaaatcctagctaaagaaaaggacactataagaaaggaatattggagatacattggaagatcccttcaaagcaaacacagcacagaaaatgactcaccaacaaatgtacagcaataacaccatccagaagaacttgatggaatgcttttattttttattaagggaccctgcaggagtttcacacgagagtggtccttccctttgcctgtggtgtaaaagtgcatcacacaggtattgctttttaacaagaactgatgctccttgggtgctgctgctactcagactagctctaagtaatgtgattcttctaaagcaaagtcattggatgggaggaggaagaaaaagtcccataaaggaacttttgtagtcttatcaacatataatctaatcccttagcatcagctcctccctcagtggtacatgcgtcaagatttgtagcagtaataactgcaggtcacttgtatgtaatggatgtgaggtagccgaagtttggttcagtaagcagggaatacagtcgttccatcagagctggtctgcacactcncattatcttgctatcnctgtaaccaactaatgccaaaagaacggntttgtaataaaattatagctgtatctaanaaaannnnnnnnnnnnnnnnnnnnnnn

SEQ ID NO: 115 - DNA, 1162 bp, Homo Sapiens
  misc_feature (1)..(1): n is a, c, g, or t
  misc_feature (4)..(4): n is a, c, g, or t
  misc_feature (771)..(771): n is a, c, g, or t
  misc_feature (918)..(918): n is a, c, g, or t
  misc_feature (938)..(938): n is a, c, g, or t
  misc_feature (945)..(945): n is a, c, g, or t
  misc_feature (969)..(969): n is a, c, g, or t
  misc_feature (987)..(987): n is a, c, g, or t
  misc_feature (991)..(991): n is a, c, g, or t
  misc_feature (997)..(997): n is a, c, g, or t
  misc_feature (1000)..(1000): n is a, c, g, or t
  misc_feature (1003)..(1003): n is a, c, g, or t
  misc_feature (1029)..(1029): n is a, c, g, or t
  misc_feature (1031)..(1031): n is a, c, g, or t
  misc_feature (1033)..(1033): n is a, c, g, or t
  misc_feature (1035)..(1035): n is a, c, g, or t
  misc_feature (1037)..(1037): n is a, c, g, or t
  misc_feature (1063)..(1063): n is a, c, g, or t
  misc_feature (1074)..(1074): n is a, c, g, or t
  misc_feature (1099)..(1099): n is a, c, g, or t
  misc_feature (1105)..(1105): n is a, c, g, or t
  misc_feature (1108)..(1108): n is a, c, g, or t
  misc_feature (1113)..(1113): n is a, c, g, or t
  misc_feature (1115)..(1115): n is a, c, g, or t
  misc_feature (1126)..(1126): n is a, c, g, or t
  misc_feature (1139)..(1139): n is a, c, g, or t
  misc_feature (1145)..(1146): n is a, c, g, or t
  misc_feature (1155)..(1155): n is a, c, g, or t
  misc_feature (1160)..(1160): n is a, c, g, or t
  misc_feature (1162)..(1162): n is a, c, g, or t
naantagagaaattactatgagaggatcgcatcaccatcaccatcacggatcctatttaggtgacactatagaatcgtcgacccacgcgtccggtgctgagttgttggagctggacatccgggaggtgtatcagcctggctcagttctggactttcctcgacgtcctccttggagctatgagatgtccaaggagcaactaatgagccaagaggaacggagcttccaagactatcttgggaagattcatggggcttactcctctgagaaactcagctactttgagcacaatctggagacatggaggcagctgtggcgggtgttagagatgtctgacatcgtcctgcttatcactgatatccgacatccagttgtgaatttcccgccagcactttatgagtatgtgactggagaacttggactggccctggtgctggttttgaacaaggtggatctggccccgccagctcttgtggttgcctggaagcattatttccatcaacactatccccagctccacgtcgtccttttcacctcttttcctcgggacccccgcaccccacaggatcctagtagtgtcttgaagaagagtcggaggcgggggagaggatggactcgggccctggggccagagcagttgctgagagcctgtgaagccatcactgtggggaaagtggacttgagcagctggcgggagaagattgctcgggatgtggctggggccacctggggtaatggctctggggaggaggaggaagaggaggatggcccancagtcctggtggagcagcagactgattcagcaatggagccaactggcccaacccaagagcgctacaaggatggggtggtgaccatcggctgtgtgggtttccctaatgtgggaaagtcctcgctgatcaatgggctggtgggggcgnaaagtcctgagtgtctccanaaccccnggccatacccgaaactttcaaacnactttctaacccctctgngaanctctgngantgnccaggcctcatcttccaattcttcgncnangnantgcagttctggcaggattacctatcnccaaatcagancctaactgtgggggtactggccccnaatccnggnagccngntcccctggccnccaaaggtgagancccccnnggaaacccnggggncn

SEQ ID NO: 116 - DNA, 1200 bp, Homo Sapiens
  misc_feature (1)..(1): n is a, c, g, or t
  misc_feature (953)..(953): n is a, c, g, or t
  misc_feature (979)..(979): n is a, c, g, or t
  misc_feature (983)..(983): n is a, c, g, or t
  misc_feature (1013)..(1013): n is a, c, g, or t
  misc_feature (1023)..(1023): n is a, c, g, or t
  misc_feature (1026)..(1026): n is a, c, g, or t
  misc_feature (1038)..(1038): n is a, c, g, or t
  misc_feature (1041)..(1041): n is a, c, g, or t
  misc_feature (1048)..(1048): n is a, c, g, or t
  misc_feature (1050)..(1050): n is a, c, g, or t
  misc_feature (1055)..(1055): n is a, c, g, or t
  misc_feature (1080)..(1080): n is a, c, g, or t
  misc_feature (1102)..(1103): n is a, c, g, or t
  misc_feature (1105)..(1105): n is a, c, g, or t
  misc_feature (1113)..(1113): n is a, c, g, or t
  misc_feature (1118)..(1119): n is a, c, g, or t
  misc_feature (1121)..(1121): n is a, c, g, or t
  misc_feature (1151)..(1152): n is a, c, g, or t
  misc_feature (1158)..(1158): n is a, c, g, or t
  misc_feature (1179)..(1179): n is a, c, g, or t
  misc_feature (1187)..(1187): n is a, c, g, or t
  misc_feature (1200)..(1200): n is a, c, g, or t
natagagaaattactatgagaggatcgcatcaccatcaccatcacggatcctatttaggtgacactatagaatcgtcgacccacgcgtccgccgtgagggaagcgtctccgttgggtccggccgctctgcgggactctgaggaaaagctcgcaccaggtggacgcggatctgtcaacatgggtaaaggagaccccaacaagccgcggggcaaaatgtcctcgtacgccttcttcgtgcagacctgccgggaagagcacaagaagaaacacccggactcttccgtcaatttcgcggaattctccaagaagtgttcggagagatggaagaccatgtctgcaaaggagaagtcgaagtttgaagatatggcaaaaagtgacaaagctcgctatgacagggagatgaaaaattacgttcctcccaaaggtgataagaaggggaagaaaaaggaccccaatgctcctaaaaggccaccatctgccttcttcctgttttgctctgaacatcgcccaaagatcaaaagtgaacaccctggcctatccattggggatactgcaaagaaattgggtgaaatgtggtctgagcagtcagccaaagataaacaaccatatgaacagaaagcagctaagctaaaggagaaatatgaaaaggatattgctgcatatcgtgccaagggcaaaagtgaagcaggaaagaagggccctggcaggccaacaggctcaaagaagaagaacgaaccagaagatgaggaggaggaggaggaagaagaagatgaagatgaggaggaagaggatgaagatgaagaataaatggctatcctttaatgatgcgtgtggaatgtgtgtgtgtgctcaggcaattattttgctaaaaatgtgaattcaagtgcagctcaatactagcttcagtataaaactgtacagatttttgtatagcctgataagattctctgtanagaaaatacttttaaaaatgcaggtngtanctttttgatgggctactcatacagttaaanttttacagcntcnggatgttgaaangtncctaaananttaangggtttttttaatttccttggggangggaacccccccaaactttgtnngnaattaatntccannantaaatttttggggttttttaggaggttgcnntttccntttttttaaaaaaatttttgnaaaaaaantttttgttttttn

SEQ ID NO: 117 - DNA, 940 bp, Homo Sapiens
tgagaggatcgcatcaccatcaccatcacggatcctatttaggtgacactatagaatcgtcgacccacgcgtccgatcagagggatcagcagctccagggaaggcctggctgccccgcttctaaatgccactccccctcccatcagcgttcgtgctgtcagccttgcagccttctcctactcattccagctccaatacccagcggctgccagaccgagtgaccggcgtggacacagaccctcacttcatcatccacgtgccccagaaagaggacaccctgtgcttcaacatcaatgaggagcctggtgttatcctgagcctggtacaggaccccaacacaggcttctcagtgaatggacagctcattggcaacaaggccaggagccctgggcagcatgacggcacgtacttcgggcggctgggaatcgcaaaccctgccacggactttcagttggaagtgactcctcagaacattacgctgaaccccggctttggtgggcctgtgttttcctggagggaccaagctgtgctgcggcaggacggggtggtggtgaccatcaacaagaagaggaacctggtggtgtctgtggacgacggtggcacctttgaggttgttttgcaccgagtgtggaaggggagctcggtccaccaggacttcctgggcttctatgtgctggacagtcatcggatgtcagcccggacgcacgggctgctggggcaatttttccaccccatcggttttgaagtgtctgacatccacccaggctctgaccccacaaagccagatgccacgatggtggtgaggaaccgccggctcacggtcaccaggggtttgcaaaaagactacagcaaggacccgtggcatggggccgaggtgtcctgctggttcattcacaacaatggggctggactcatcgatggtgcctacactgattatatc

SEQ ID NO: 118 - DNA, 1385 bp, Homo Sapiens
  misc_feature (838)..(838): n is a, c, g, or t
  misc_feature (881)..(881): n is a, c, g, or t
  misc_feature (886)..(886): n is a, c, g, or t
  misc_feature (889)..(889): n is a, c, g, or t
  misc_feature (900)..(900): n is a, c, g, or t
  misc_feature (913)..(913): n is a, c, g, or t
  misc_feature (970)..(970): n is a, c, g, or t
  misc_feature (1003)..(1003): n is a, c, g, or t
  misc_feature (1009)..(1009): n is a, c, g, or t
  misc_feature (1013)..(1013): n is a, c, g, or t
  misc_feature (1023)..(1023): n is a, c, g, or t
  misc_feature (1038)..(1039): n is a, c, g, or t
  misc_feature (1041)..(1041): n is a, c, g, or t
  misc_feature (1068)..(1068): n is a, c, g, or t
  misc_feature (1081)..(1081): n is a, c, g, or t
  misc_feature (1091)..(1091): n is a, c, g, or t
  misc_feature (1093)..(1093): n is a, c, g, or t
  misc_feature (1104)..(1104): n is a, c, g, or t
  misc_feature (1110)..(1110): n is a, c, g, or t
  misc_feature (1115)..(1115): n is a, c, g, or t
  misc_feature (1140)..(1140): n is a, c, g, or t
  misc_feature (1147)..(1149): n is a, c, g, or t
  misc_feature (1155)..(1155): n is a, c, g, or t
  misc_feature (1157)..(1157): n is a, c, g, or t
  misc_feature (1170)..(1170): n is a, c, g, or t
  misc_feature (1176)..(1176): n is a, c, g, or t
  misc_feature (1178)..(1178): n is a, c, g, or t
  misc_feature (1181)..(1181): n is a, c, g, or t
  misc_feature (1183)..(1183): n is a, c, g, or t
  misc_feature (1186)..(1186): n is a, c, g, or t
  misc_feature (1200)..(1200): n is a, c, g, or t
  misc_feature (1212)..(1213): n is a, c, g, or t
  misc_feature (1215)..(1215): n is a, c, g, or t
  misc_feature (1228)..(1228): n is a, c, g, or t
  misc_feature (1258)..(1258): n is a, c, g, or t
  misc_feature (1264)..(1265): n is a, c, g, or t
  misc_feature (1270)..(1270): n is a, c, g, or t
  misc_feature (1283)..(1283): n is a, c, g, or t
  misc_feature (1292)..(1292): n is a, c, g, or t
  misc_feature (1300)..(1300): n is a, c, g, or t
  misc_feature (1309)..(1309): n is a, c, g, or t
  misc_feature (1313)..(1313): n is a, c, g, or t
  misc_feature (1319)..(1319): n is a, c, g, or t
  misc_feature (1327)..(1327): n is a, c, g, or t
  misc_feature (1338)..(1339): n is a, c, g, or t
  misc_feature (1346)..(1346): n is a, c, g, or t
  misc_feature (1353)..(1353): n is a, c, g, or t
  misc_feature (1357)..(1357): n is a, c, g, or t
  misc_feature (1359)..(1359): n is a, c, g, or t
  misc_feature (1365)..(1365): n is a, c, g, or t
aaatagagaaattaactatgagaggatcgcatcaccatcaccatcacggatcctatttaggtgacactatagaatcgtcgacccacgcgtccgcctgtgacaaggagactgggaggtgtctcaagtgcctgtaccacacggaaggggaacactgtcagttctgccggtttggatactatggtgatgccctccggcaggactgtcgaaagtgtgtctgtaattacctgggcaccgtgcaagagcactgtaacggctctgactgccagtgcgacaaagccactggtcagtgcttgtgtcttcctaatgtgatcgggcagaactgtgaccgctgtgcgcccaatacctggcagctggccagtggcactggctgtgacccatgcaactgcaatgctgctcattccttcgggccatcttgcaatgagttcacggggcagtgccagtgcatgcctgggtttggaggccgcacctgcagcgagtgccaggaactcttctggggagaccccgacgtggagtgccgagcctgtgactgtgaccccaggggcattgagacgccacagtgtgaccagtccacgggccagtgtgtctgcgttgagggtgttgagggtccacgctgtgacaagtgcacgcgagggtactcgggggtcttccctgactgcacaccctgccaccagtgctttgctctctgggatgtgatcattgccgagctgaccaacaggacacacagattcctggagaaagccaaggccttgaagatcagtggtgtgatcgggccttaccgtgaaactgtggactcggtggagaggaaagtcagcgagataaaagacatcctggcgcaaanccccgcagcaaaaccactgaaaaacattgggaatctctttgangaaancanagaaactgatnaaagatgttacanaaaatgatggctcaagtaaaagtgaaattatctgacacaactttcccaaagcaacancacagccaaaaaactggattctctacaaaaaanaaaccnaaancctaaaacancactgttgaaaaaanntngctgaaaaactggaatttatcaaaaanctcaaaaatttcngggggccctngnaaaacattacnaaatantttcnaaatttccttgaagcaaaaaaaaanggtgaannncctccncncaaaaacccaaancccttngnaanantcncccctttgaaaaanaaaataaaaaanntnttgatggacccanaaacccctttcaggaaaaaaaaaaaaaagntccccnntttanaaatggggggaantaaaaaccnaaactttnccccctccnaaanactggnaaaccccngggcccttttnnaaaaaangtggggncccntnaaattnaaaaaaaaaaatgggggccc

SEQ ID NO: 119 - DNA, 1122 bp, Homo Sapiens
  misc_feature (641)..(641): n is a, c, g, or t
  misc_feature (684)..(684): n is a, c, g, or t
  misc_feature (694)..(694): n is a, c, g, or t
  misc_feature (697)..(697): n is a, c, g, or t
  misc_feature (699)..(699): n is a, c, g, or t
  misc_feature (701)..(701): n is a, c, g, or t
  misc_feature (716)..(716): n is a, c, g, or t
  misc_feature (729)..(729): n is a, c, g, or t
  misc_feature (773)..(773): n is a, c, g, or t
  misc_feature (800)..(800): n is a, c, g, or t
  misc_feature (821)..(821): n is a, c, g, or t
  misc_feature (853)..(853): n is a, c, g, or t
  misc_feature (862)..(862): n is a, c, g, or t
  misc_feature (872)..(872): n is a, c, g, or t
  misc_feature (885)..(887): n is a, c, g, or t
  misc_feature (890)..(890): n is a, c, g, or t
  misc_feature (896)..(896): n is a, c, g, or t
  misc_feature (905)..(905): n is a, c, g, or t
  misc_feature (907)..(908): n is a, c, g, or t
  misc_feature (933)..(933): n is a, c, g, or t
  misc_feature (938)..(938): n is a, c, g, or t
  misc_feature (947)..(947): n is a, c, g, or t
  misc_feature (952)..(952): n is a, c, g, or t
  misc_feature (956)..(956): n is a, c, g, or t
  misc_feature (959)..(960): n is a, c, g, or t
  misc_feature (962)..(962): n is a, c, g, or t
  misc_feature (970)..(970): n is a, c, g, or t
  misc_feature (984)..(984): n is a, c, g, or t
  misc_feature (994)..(994): n is a, c, g, or t
  misc_feature (996)..(996): n is a, c, g, or t
  misc_feature (1002)..(1002): n is a, c, g, or t
  misc_feature (1004)..(1004): n is a, c, g, or t
  misc_feature (1016)..(1016): n is a, c, g, or t
  misc_feature (1025)..(1025): n is a, c, g, or t
  misc_feature (1027)..(1028): n is a, c, g, or t
  misc_feature (1033)..(1033): n is a, c, g, or t
  misc_feature (1043)..(1043): n is a, c, g, or t
  misc_feature (1058)..(1058): n is a, c, g, or t
  misc_feature (1079)..(1079): n is a, c, g, or t
  misc_feature (1086)..(1086): n is a, c, g, or t
  misc_feature (1091)..(1091): n is a, c, g, or t
  misc_feature (1094)..(1094): n is a, c, g, or t
  misc_feature (1106)..(1106): n is a, c, g, or t
  misc_feature (1109)..(1109): n is a, c, g, or t
  misc_feature (1111)..(1111): n is a, c, g, or t
agaaattactatgagaggatcgcatcaccatcaccattcacggatcctatttaggtgacactatagaatcgtcgacccacgcgtccgctcatggctcctgtcaccaggtctcaggtcagggtccagcaggccctgagctgacgtgtggagccagagccacccaatcccgtagggacaggtttcacaacttcccggatggggctgtggtgggtcacagtgcagcctccagccagaaggatggggtggctcccactcctgctgcttctgactcaatgcttaggggtccctgggcagcgctcgccattgaatgacttccaagtgctccggggcacagagctacagcacctgctacatgcggtggtgcccgggccttggcaggaggatgtggcagatgctgaagagtgtgctggtcgctgtgggcccttaatggactgccgggccttccactacaacgtgagcagccatggttgccaactgctgccatggactcaacactcgccccacacgaggctgcggcgttctgggcgctgtgacctcttccagaagaaagactacgtacggacctgcatcatgaacaatggggttgggtaccggggcaccatggccacgaccgtgggtggcctgccctgccaggcttgganccacaagttcccaaatgatcacaagtacacgcccactctccgnaatggcctgnaananancttctgccgtaaccntgatggcgacccngaagtccttggtgctacacaacagaacctgctgtgcgcttccanaactgcggcatcaatcctgccggaagncccgtgtgtctggtgcaatgncaagaaaaccgcggcgcggtaaacccacggantcaggcccnagtgccaacnctggaattttcannnccngcacancaccctttnanncgggttcctcgaacaaggtctgganaaaantattgccgnaatcntganggnncnaacggcanggtgctaactacgnatcccaaatnancgaaantntgtgacctcccnctggggtcnanncaaanccccccaaangcaaaatgtcactgntcccggaaaggtgaggctacngggcaancaaanccnatgggggtactntangntggaacccaaa

SEQ ID NO: 120 - DNA, 1236 bp, Homo Sapiens
  misc_feature (912)..(912): n is a, c, g, or t
  misc_feature (920)..(920): n is a, c, g, or t
  misc_feature (938)..(938): n is a, c, g, or t
  misc_feature (951)..(951): n is a, c, g, or t
  misc_feature (954)..(954): n is a, c, g, or t
  misc_feature (986)..(986): n is a, c, g, or t
  misc_feature (992)..(992): n is a, c, g, or t
  misc_feature (994)..(994): n is a, c, g, or t
  misc_feature (1002)..(1003): n is a, c, g, or t
  misc_feature (1026)..(1026): n is a, c, g, or t
  misc_feature (1030)..(1030): n is a, c, g, or t
  misc_feature (1034)..(1034): n is a, c, g, or t
  misc_feature (1046)..(1046): n is a, c, g, or t
  misc_feature (1048)..(1048): n is a, c, g, or t
  misc_feature (1070)..(1070): n is a, c, g, or t
  misc_feature (1074)..(1074): n is a, c, g, or t
  misc_feature (1083)..(1083): n is a, c, g, or t
  misc_feature (1102)..(1102): n is a, c, g, or t
  misc_feature (1105)..(1105): n is a, c, g, or t
  misc_feature (1109)..(1109): n is a, c, g, or t
  misc_feature (1124)..(1124): n is a, c, g, or t
  misc_feature (1126)..(1127): n is a, c, g, or t
  misc_feature (1129)..(1129): n is a, c, g, or t
  misc_feature (1132)..(1132): n is a, c, g, or t
  misc_feature (1138)..(1139): n is a, c, g, or t
  misc_feature (1149)..(1149): n is a, c, g, or t
  misc_feature (1171)..(1171): n is a, c, g, or t
  misc_feature (1181)..(1182): n is a, c, g, or t
  misc_feature (1192)..(1193): n is a, c, g, or t
  misc_feature (1197)..(1197): n is a, c, g, or t
  misc_feature (1203)..(1203): n is a, c, g, or t
  misc_feature (1206)..(1206): n is a, c, g, or t
  misc_feature (1209)..(1210): n is a, c, g, or t
  misc_feature (1219)..(1219): n is a, c, g, or t
tagagaaattactatgagaggatcgcatcaccatcaccatcacggatcctatttaggtgacactatagaatcgtcgacccacgcgtccggtcaaagtcagagtggtggtcatggtcctggaggtggcaagaaggatgacaaggacaagaaaaagaaatatgaacctcctgtaccaactagagtggggaaaaagaagaagaaaacaaagggaccagatgctgccagcaaactgccactggtgacacctcacactcagtgccggttaaaattactgaagttagagagaattaaagactatcttctcatggaggaagaattcattagaaatcaggaacaaatgaaaccattagaagaaaagcaagaggaggaaagatcaaaagtggatgatctgagggggaccccgatgtcagtaggaaccttggaagagattattgatgacaatcatgccatcgtgtctacatctgtgggctcagaacactacgtcagcattctttcatttgtagacaaggatctgctggaacctggctgctcggtcctgctcaaccacaaggtgcatgccgtgataggggtgctgatggatgacacggatcccctggtcacagtgatgaaggtagaaaaggccccccaggagacctatgcagatattggggggttggacaaccaaattcaggaaattaaggaatctgtggagcttcctctcacccatcctgaatattatgaagagatgggtataaagcctcctaagggggtcattctctatggtccacctggcacaggtaaaaccttgttagccaaagcagtagcaaaccaaacctcagccactttcttgagagtggttggctctgaacttattcagaagtacctaggtgatgggccccaaactcgtacgggaattgttccgagttgctgaanaacatgcnccgtccatcgtgtttatngatgaaattgacnccnttgggacaaaaaaatatgactccaattctggnggtgananaaaattcnncgaacaatgttggaactgctganccanttgnatggatttgatncnaggggaaatgggaaagttttcntggnccccaaccnaataaaaactttggatccngcncttntcaaaccagcccccntnnanggnaaaatnnatttcccccngcctgaaaaaaaaacaaaaaancccctctttnnaattcccccnncccnggatanccntgnnttaaaatgnacccctggaaacctgtt

SEQ ID NO: 121 - DNA, 1179 bp, Homo Sapiens
  misc_feature (2)..(2): n is a, c, g, or t
  misc_feature (771)..(771): n is a, c, g, or t
  misc_feature (868)..(868): n is a, c, g, or t
  misc_feature (925)..(925): n is a, c, g, or t
  misc_feature (935)..(935): n is a, c, g, or t
  misc_feature (937)..(937): n is a, c, g, or t
  misc_feature (941)..(941): n is a, c, g, or t
  misc_feature (954)..(954): n is a, c, g, or t
  misc_feature (968)..(968): n is a, c, g, or t
  misc_feature (975)..(975): n is a, c, g, or t
  misc_feature (1003)..(1003): n is a, c, g, or t
  misc_feature (1005)..(1005): n is a, c, g, or t
  misc_feature (1019)..(1019): n is a, c, g, or t
  misc_feature (1037)..(1037): n is a, c, g, or t
  misc_feature (1039)..(1039): n is a, c, g, or t
  misc_feature (1055)..(1055): n is a, c, g, or t
  misc_feature (1066)..(1066): n is a, c, g, or t
  misc_feature (1070)..(1071): n is a, c, g, or t
  misc_feature (1083)..(1083): n is a, c, g, or t
  misc_feature (1087)..(1087): n is a, c, g, or t
  misc_feature (1094)..(1097): n is a, c, g, or t
  misc_feature (1099)..(1099): n is a, c, g, or t
  misc_feature (1113)..(1113): n is a, c, g, or t
  misc_feature (1118)..(1118): n is a, c, g, or t
  misc_feature (1125)..(1125): n is a, c, g, or t
  misc_feature (1138)..(1138): n is a, c, g, or t
  misc_feature (1146)..(1146): n is a, c, g, or t
  misc_feature (1151)..(1151): n is a, c, g, or t
  misc_feature (1160)..(1160): n is a, c, g, or t
  misc_feature (1175)..(1175): n is a, c, g, or t
antagagaaattactatgagaggatcgcatcaccatcaccatcacggatcctatttaggtgacactatagaatcgtcgacccacgcgtccggcccgtcccgtcgccgccgccgccgccgcagacccctcggtcttgctatgtcgagctcacccgtgaagcgtcagaggatggagtccgcgctggaccagctcaagcagttcaccaccgtggtggccgacacgggcgacttccacgccatcgacgagtacaagccccaggatgctaccaccaacccgtccctgatcctggccgcagcacagatgcccgcttaccaggagctggtggaggaggcgattgcctatggccggaagctgggcgggtcacaagaggaccagattaaaaatgctattgataaactttttgtgttgtttggagcagaaatactaaagaagattccgggccgagtatccacagaagtagacgcaaggctctcctttgataaagatgcgatggtggccagagccaggcggctcatcgagctctacaaggaagctgggatcagcaaggaccgaattcttataaagctgtcatcaacctgggaaggaattcaggctggaaaggagctcgaggagcagcacggcatccactgcaacatgacgttactcttctccttcgcccaggctgtggcctgtgccgaggcgggtgtgaccctcatctccccatttgttgggcgcatccttgattggcatgtggcaaacaccgacaagaaatcctatgagcccctggaagancctggggtaaagagtgtcactaaaatctacaactactacaagaagtttagctacaaaaccattgtcatgggcgcctcctttccgcaacacgggcganatcaaagcactggccggctgtgacttcctcaccatctcacccaagctcctgggaaanctgctgcagnanaacnccaagctggggcntgtgctctcaaccnagggggnccaagccagtgacttggaaaaaaatccncntggaagaaaaattntttccgttggttgccaancnaggaccaaatgggtgngaaaaactttntgannggattccccaantttnccccctnnnncntgaaactggaacgnatctnaaaaaanaatggttcatgcnaaaaatgnaaaanacccctccntgagggtggaatccnaatt

SEQ ID NO: 122 - DNA, 1342 bp, Homo Sapiens
  misc_feature (943)..(943): n is a, c, g, or t
  misc_feature (957)..(957): n is a, c, g, or t
  misc_feature (966)..(966): n is a, c, g, or t
  misc_feature (984)..(984): n is a, c, g, or t
  misc_feature (986)..(986): n is a, c, g, or t
  misc_feature (989)..(989): n is a, c, g, or t
  misc_feature (1002)..(1003): n is a, c, g, or t
  misc_feature (1016)..(1016): n is a, c, g, or t
  misc_feature (1038)..(1038): n is a, c, g, or t
  misc_feature (1048)..(1048): n is a, c, g, or t
  misc_feature (1062)..(1062): n is a, c, g, or t
  misc_feature (1070)..(1070): n is a, c, g, or t
  misc_feature (1075)..(1075): n is a, c, g, or t
  misc_feature (1077)..(1077): n is a, c, g, or t
  misc_feature (1083)..(1083): n is a, c, g, or t
  misc_feature (1101)..(1101): n is a, c, g, or t
  misc_feature (1116)..(1117): n is a, c, g, or t
  misc_feature (1134)..(1135): n is a, c, g, or t
  misc_feature (1160)..(1162): n is a, c, g, or t
  misc_feature (1179)..(1179): n is a, c, g, or t
  misc_feature (1188)..(1188): n is a, c, g, or t
  misc_feature (1194)..(1194): n is a, c, g, or t
  misc_feature (1205)..(1205): n is a, c, g, or t
  misc_feature (1207)..(1207): n is a, c, g, or t
  misc_feature (1228)..(1229): n is a, c, g, or t
  misc_feature (1240)..(1240): n is a, c, g, or t
  misc_feature (1243)..(1244): n is a, c, g, or t
  misc_feature (1247)..(1247): n is a, c, g, or t
  misc_feature (1252)..(1253): n is a, c, g, or t
  misc_feature (1255)..(1255): n is a, c, g, or t
  misc_feature (1258)..(1258): n is a, c, g, or t
  misc_feature (1260)..(1260): n is a, c, g, or t
  misc_feature (1263)..(1264): n is a, c, g, or t
  misc_feature (1278)..(1279): n is a, c, g, or t
  misc_feature (1297)..(1297): n is a, c, g, or t
  misc_feature (1305)..(1305): n is a, c, g, or t
  misc_feature (1325)..(1325): n is a, c, g, or t
  misc_feature (1334)..(1334): n is a, c, g, or t
  misc_feature (1340)..(1340): n is a, c, g, or t
atagagaaattactatgagaggatcgcatcaccatcaccatcacggatcctatttaggtgacactatagaatcgtcgacccacgcgtccgctgtggtcttctctgaggaggagctgcaactgctggaccttgcccagaggaagctgtaccgagatgtgatgctggagaacttcaggaatgtggtctcagtggggcatcagtccacaccagatggcctaccacagttagagagagaagaaaagctgtggatgatgaagatggcaacccagagagataactcctcaggagccaagaatctaaaagagatggagactcttcaagaagtaggattaaggtacctgcctcatgaagagcttttctgctcccagatctggcaacagattacaagagagttaatcaagtatcaagattctgtggtaaatattcaaagaacaggctgccagttggaaaaacgagatgatttgcactataaagatgagggattcagtaatcagagttcccatcttcaagttcacagagtccacactggtgaaaaaccctacaaaggagaacattgtgtgaaaagtttcagctggagctctcatcttcaaattaaccaaagggctcacgcaggagagaagccctacaaatgtgaaaaatgtgataatgccttccgtcggttttcaagtcttcaagcccatcagagagtccacagtagagcaaaatcatacacaaatgatgcaagttacaggagttttagtcagaggtcacatcttccccatcatcagagagttcccactggagagaatccatacaaatatgaagagtgtgggaggaatgttgggaaaagctcacattgtcaagctcctctgatagttcatacgggagagaaaccctataatgtgaggagtgtggggtggggcttcagtcaaagatcatatcttccagttcatctgaaagttcncactggaaaagaanccatataantgtgaaaagtgtgggaananctncagttggcgttcnngactgcaggctcntgagcgaatcccccctggcganaaaccatacnaatgcaatgcctgnggcaaganctttnanttaccnctccccccttaatattcntggtaaaatcccccnnggaaaaaacccttaaanntgggagaaggggggaaagggttccnnngggggtcccccccttcnggcccctcnaaaaancccccctgggnanaaaccctaaaaatgggggganngggggaaaggnttnngcnggccnnanttngnggnncctcaaaaggcctnntgggaaaaacccttcccnggggggcngggggagggcctccccccancccaatttncctttntt

SEQ ID NO: 123 - DNA, 1237 bp, Homo Sapiens
  misc_feature (901)..(901): n is a, c, g, or t
  misc_feature (908)..(908): n is a, c, g, or t
  misc_feature (938)..(938): n is a, c, g, or t
  misc_feature (946)..(946): n is a, c, g, or t
  misc_feature (958)..(958): n is a, c, g, or t
  misc_feature (967)..(967): n is a, c, g, or t
  misc_feature (973)..(973): n is a, c, g, or t
  misc_feature (991)..(991): n is a, c, g, or t
  misc_feature (996)..(996): n is a, c, g, or t
  misc_feature (998)..(998): n is a, c, g, or t
  misc_feature (1000)..(1000): n is a, c, g, or t
  misc_feature (1006)..(1006): n is a, c, g, or t
  misc_feature (1011)..(1011): n is a, c, g, or t
  misc_feature (1019)..(1019): n is a, c, g, or t
  misc_feature (1031)..(1031): n is a, c, g, or t
  misc_feature (1045)..(1045): n is a, c, g, or t
  misc_feature (1050)..(1050): n is a, c, g, or t
  misc_feature (1066)..(1066): n is a, c, g, or t
  misc_feature (1070)..(1070): n is a, c, g, or t
  misc_feature (1088)..(1088): n is a, c, g, or t
  misc_feature (1091)..(1091): n is a, c, g, or t
  misc_feature (1098)..(1098): n is a, c, g, or t
  misc_feature (1104)..(1104): n is a, c, g, or t
  misc_feature (1112)..(1112): n is a, c, g, or t
  misc_feature (1114)..(1114): n is a, c, g, or t
  misc_feature (1123)..(1123): n is a, c, g, or t
  misc_feature (1127)..(1127): n is a, c, g, or t
  misc_feature (1129)..(1129): n is a, c, g, or t
  misc_feature (1139)..(1139): n is a, c, g, or t
  misc_feature (1142)..(1142): n is a, c, g, or t
  misc_feature (1144)..(1145): n is a, c, g, or t
  misc_feature (1147)..(1148): n is a, c, g, or t
  misc_feature (1161)..(1161): n is a, c, g, or t
  misc_feature (1166)..(1166): n is a, c, g, or t
  misc_feature (1185)..(1185): n is a, c, g, or t
  misc_feature (1188)..(1188): n is a, c, g, or t
  misc_feature (1191)..(1191): n is a, c, g, or t
  misc_feature (1202)..(1202): n is a, c, g, or t
  misc_feature (1208)..(1208): n is a, c, g, or t
  misc_feature (1216)..(1216): n is a, c, g, or t
  misc_feature (1220)..(1220): n is a, c, g, or t
  misc_feature (1231)..(1231): n is a, c, g, or t
tagagaaattactatgagaggatcgcatcaccatcaccatcacggatcctatttaggtgacactatagaatcgtcgacccacgcgtccgagaccattccaaaagcccagcagatgcacactgggcctgtgcttgatgtctgctggagtgacgatgggagcaaagtgtttacggcatcgtgtgataaaactgccaaaatgtgggacctcagcagtaaccaagcgatacagatcgcacagcatgatgctcctgttaaaaccatccattggatcaaagctccaaactacagctgtgtgatgactgggagctgggataagactttaaagttttgggatactcgatcgtcaaatcctatgatggttttgcaactccctgaaaggtgttactgtgctgacgtgatataccccatggctgtggtggcaactgcagagaggggcctgattgtctatcagctagagaatcaaccttctgaattcaggaggatagaatctccactgaaacatcagcatcggtgtgtggctatttttaaagacaaacagaacaagcctactggttttgccctgggaagtatcgaggggagagttgctattcactatatcaaccccccgaaccccgccaaagataacttcacctttaaatgtcatcgatctaatggaaccaacacttcagctcctcaggacatttatgcggtaaatggaatcgcgttccatcctgttcatggcacccttgcaactgtgggatctgatggtagattcagcttctgggacaaagatgccagaacaaaactaaaaacttcggaacagttagatcagcccatctcagcttgctgtttcaatcacaatggaaacatatttgcatacgcttccagctacgactggtccaaagggacatgaattttatantccccanaaaaaaattacattttcctgcgtaatgcanccgaaganctaaagcccagnaataaaaantagtgnctggaaactctggctccncccanantngtttcnccccnctctgccncatccctgtacnaatttggggtcccnccctngttgggttgtcccccntggnaaatggatttccaccccnggnaaaaacnatgtcnttgttcancnacttaaaancccngngtccccgggnaantnncnnccccccattcccnggccngttggaaaatttttctgtnacnaanggggttgaagnttttgnaaaccttnaatngcggccccccnggattt

SEQ ID NO: 124 - DNA, 1179 bp, Homo Sapiens
  misc_feature (7)..(7): n is a, c, g, or t
  misc_feature (881)..(881): n is a, c, g, or t
  misc_feature (884)..(884): n is a, c, g, or t
  misc_feature (921)..(921): n is a, c, g, or t
  misc_feature (941)..(941): n is a, c, g, or t
  misc_feature (944)..(944): n is a, c, g, or t
  misc_feature (974)..(974): n is a, c, g, or t
  misc_feature (988)..(988): n is a, c, g, or t
  misc_feature (997)..(997): n is a, c, g, or t
  misc_feature (1024)..(1024): n is a, c, g, or t
  misc_feature (1026)..(1026): n is a, c, g, or t
  misc_feature (1042)..(1042): n is a, c, g, or t
  misc_feature (1045)..(1046): n is a, c, g, or t
  misc_feature (1057)..(1057): n is a, c, g, or t
  misc_feature (1062)..(1062): n is a, c, g, or t
  misc_feature (1065)..(1065): n is a, c, g, or t
  misc_feature (1069)..(1069): n is a, c, g, or t
  misc_feature (1078)..(1079): n is a, c, g, or t
  misc_feature (1090)..(1090): n is a, c, g, or t
  misc_feature (1111)..(1111): n is a, c, g, or t
  misc_feature (1120)..(1120): n is a, c, g, or t
  misc_feature (1137)..(1137): n is a, c, g, or t
  misc_feature (1139)..(1139): n is a, c, g, or t
  misc_feature (1166)..(1166): n is a, c, g, or t
  misc_feature (1173)..(1173): n is a, c, g, or t
  misc_feature (1177)..(1177): n is a, c, g, or t
tagaganattactatgagaggatcgcatcaccatcaccatcacggatcctatttaggtgacactatagaatcgtcgacccacgcgtccgggcgtatgaccgcaacccttgccgctgccgctgacatcgctaccatggtctccggcagcagcggcctcgccgccgcccgtctcctgtcgcgcagcttcctcctgccgcagaatggaattcggcattgttcctacacagcttctcggcaacatctctatgttgataaaaatacaaagattatttgccagggtttcactggcaaacagggcacctttcacagccagcaggcattggaatatggcaccaaactcgttggaggaaccactccagggaaaggaggccagacacatctgggcttacctgtctttaatactgtgaaggaggccaaagaacagacaggagcaacggcttctgtcatttatgttcctccgccctttgctgctgctgccattaatgaagctattgaggcagaaattcccttggttgtgtgtatcactgaaggaattccccagcaggacatggtacgagtcaagcacaaactgctgcgccaggaaaagacaaggctaattgggcccaactgccctggagtcatcaatcctggagaatgtaaaattggcatcatgcctggccatattcacaaaaaaggaaggattggcattgtgtccagatctggcaccctgacttatgaagcagttcaccaaacaacgcaagttggattggggcagtctttgtgcgttggcattggaggtgatccttttaatggaacagattttattgactgcctcgaaatctttttgaacgattctgccacagaaggcatcatattgattggtgaaattggtggtaatgcanaanagaatgctgcaaaatttttgaagcaacataaattcangtccaaatttccaagcctgnagngtcccttcattgctgggtttaactgctccncctgggaaaaaaangggtcatgnccggggcaattattgcttggaggaaangnggaactaaagaaaaantcnntgcccttcaanggcanganttgngggtcatannttcccctgccnagctgggaaaccccgatttanaggaatttnaaaaaaggaaaattctntnaaaaaaaaaaaaattcctaaaatgggnaaagganccgnaa

SEQ ID NO: 125 - DNA, 1222 bp, Homo Sapiens
  misc_feature (922)..(922): n is a, c, g, or t
  misc_feature (972)..(972): n is a, c, g, or t
  misc_feature (998)..(998): n is a, c, g, or t
  misc_feature (1020)..(1020): n is a, c, g, or t
  misc_feature (1037)..(1037): n is a, c, g, or t
  misc_feature (1044)..(1044): n is a, c, g, or t
  misc_feature (1086)..(1086): n is a, c, g, or t
  misc_feature (1108)..(1108): n is a, c, g, or t
  misc_feature (1118)..(1118): n is a, c, g, or t
  misc_feature (1126)..(1126): n is a, c, g, or t
  misc_feature (1147)..(1147): n is a, c, g, or t
  misc_feature (1153)..(1153): n is a, c, g, or t
  misc_feature (1161)..(1161): n is a, c, g, or t
  misc_feature (1164)..(1164): n is a, c, g, or t
  misc_feature (1169)..(1169): n is a, c, g, or t
  misc_feature (1173)..(1174): n is a, c, g, or t
  misc_feature (1193)..(1193): n is a, c, g, or t
  misc_feature (1195)..(1195): n is a, c, g, or t
  misc_feature (1208)..(1222): n is a, c, g, or t
tagagaaattactatgagaggatcgcatcaccatcaccatcacggatcctatttaggtgacactatagaatcgtcgacccacgcgtccgcccacgcgtccgggccgcaaggacccggacctcagggaggcctccgcacgaagtcggaccgtcctgcgcgccgcctaagtccaggcttgcccgtctgctgccaggcaacaacgcccctagtctctccgttcgggaagacgcgtggccctgcctgccacccaccggaagtgagggcaaatggcaacagcggctctggaattctatacaggcattgctgaggacacctaagatgacgcaatctccgcgcgggtagggcggggctccgcaaggacctcatgccttagagatcgcctgaagagcggaagccttctgtcgagaagcagctacccaagctccaggagcttccgaagaaacaggaccagagagggaaggtgacctgaaagtcacagaataattttttagagctgaacaagaatccaagcctgcaactgcagagacgagagatctttctgctgtctatactcttggaaagcacatcctaagatctttgcagattatcctgtggaaggaaaatgcctaaagtcaaaagaagccggaaagcacccccagatggctgggagttgattgagccaacactggatgaattagatcaaaagatgagagaagctgaaacagaaccgcatgagggaaagaggaaagtggaatctctgtggcccatcttcaggatccaccaccagaaaacccgctacatcttcgacctcttttacaagcggaaagccatcagcagagaactctatgaatattgtattaaagaaggctatgcagacaaaaacctgattgcaaaatggaaaaagcaaggatatgagaacttgtgctgcctgcggtgcattcanacacgggacaccaacttcgggacgaactgcatctgccgcgtgcccaaaancaagctggaagtgggccgcatcatcnagtgcacacactgtggctgtcntggctgctctggctgangctggcncgctccccctggactctggacttcccaggttctgcctgttcnccccccccctttctggaaaacnaacatgcccnagcccaanttgaacccggtctctttgggnaggttncctgtctntcnctggnattnnaaaaaaaaattttaatttntncaaaaaaaaaaannnnnnnnnnnnnnn

SEQ ID NO: 126 - DNA, 1253 bp, Homo Sapiens
  misc_feature (1)..(1): n is a, c, g, or t
  misc_feature (901)..(901): n is a, c, g, or t
  misc_feature (903)..(903): n is a, c, g, or t
  misc_feature (929)..(929): n is a, c, g, or t
  misc_feature (940)..(940): n is a, c, g, or t
  misc_feature (949)..(949): n is a, c, g, or t
  misc_feature (960)..(960): n is a, c, g, or t
  misc_feature (962)..(962): n is a, c, g, or t
  misc_feature (969)..(969): n is a, c, g, or t
  misc_feature (991)..(991): n is a, c, g, or t
  misc_feature (995)..(995): n is a, c, g, or t
  misc_feature (999)..(999): n is a, c, g, or t
  misc_feature (1019)..(1020): n is a, c, g, or t
  misc_feature (1026)..(1026): n is a, c, g, or t
  misc_feature (1057)..(1057): n is a, c, g, or t
  misc_feature (1063)..(1063): n is a, c, g, or t
  misc_feature (1066)..(1066): n is a, c, g, or t
  misc_feature (1085)..(1085): n is a, c, g, or t
  misc_feature (1088)..(1088): n is a, c, g, or t
  misc_feature (1091)..(1091): n is a, c, g, or t
  misc_feature (1093)..(1094): n is a, c, g, or t
  misc_feature (1098)..(1098): n is a, c, g, or t
  misc_feature (1123)..(1123): n is a, c, g, or t
  misc_feature (1133)..(1133): n is a, c, g, or t
  misc_feature (1136)..(1136): n is a, c, g, or t
  misc_feature (1141)..(1141): n is a, c, g, or t
  misc_feature (1148)..(1148): n is a, c, g, or t
  misc_feature (1153)..(1153): n is a, c, g, or t
  misc_feature (1160)..(1160): n is a, c, g, or t
  misc_feature (1165)..(1165): n is a, c, g, or t
  misc_feature (1167)..(1168): n is a, c, g, or t
  misc_feature (1170)..(1170): n is a, c, g, or t
  misc_feature (1178)..(1178): n is a, c, g, or t
  misc_feature (1185)..(1185): n is a, c, g, or t
  misc_feature (1192)..(1193): n is a, c, g, or t
  misc_feature (1201)..(1202): n is a, c, g, or t
  misc_feature (1214)..(1214): n is a, c, g, or t
  misc_feature (1216)..(1216): n is a, c, g, or t
  misc_feature (1220)..(1220): n is a, c, g, or t
  misc_feature (1223)..(1223): n is a, c, g, or t
  misc_feature (1242)..(1242): n is a, c, g, or t
  misc_feature (1247)..(1249): n is a, c, g, or t
nttagagaaattactatgagaggatcgcatcaccatcaccatcacggatcctatttaggtgacactatagaatcgtcgacccacgcgtccggtactcggcaaaagagccctgaaatacacaggagaattgacatctcaccaagtaccctgaggaagcatacccgtttagcaggggaagagagagtttttaaagaagaaaatcaaaagggagataaaaaattaaggtgtgactctgctgaccttcggcatgacattgatcgccgtagaaaagaaagaagtaaagaacggggagattccaagggctccagggaatccagtggatcaagaaagcaggaaaaaactccaaaagattacaaggaatacaaatcttacaaagatgacagtaaacataaaagagagcaagatcattctcgatcttcatcctcttcagcatcaccttcttctcccagttctcgagaagaaaaggagagtaagaaggaaagagaagaagaatttaaaactcaccatgaaatgaaagaatactcaggctttgcaggagttagccgaccacgaggaaccttttttcgaattagaggcagaggaagagccagaggagtttttgctgggacaaatactggtccaaacaactcaaatactacttttcaaaagagaccgaaggaagaggaatgggatccagaatataccccaaagagcaagaagtacttcttgcatgacgacagagatgatggtgtggattattgggccaaaagaggaagaggtcgtggtacttttcaacgtggcagagggcgctttaacttcaaaaaatcaggtagcagtcctaaatggactcatgacaaataccaaggggatgggattgttgaagatgaagaagagaccatggaaaataatgaagaaaagaagncngacgcagggagaaaggaatattaatntgagtagattncaccgagcngacttgccccncnttttttncctgatttgtttcaataaatgnagcntttnttaatttacgttgcagtagnnaaaaanttgtttagtctcaattctgaaatataacgtngtgaantgnctgaataagtaaaaatgtnctnctntnnactnccctttaactttacgtttgtccgcntgaatccctngcnaaaanggccaanccccnggaaatncgatncnncnccggtgcnggttttncgaaaannttcccccnnaaccgggaaaantntttnaanccccctttttcgggccccnttttnnncccc

SEQ ID NO: 127 - DNA, 1181 bp, Homo Sapiens
  misc_feature (928)..(928): n is a, c, g, or t
  misc_feature (975)..(975): n is a, c, g, or t
  misc_feature (981)..(981): n is a, c, g, or t
  misc_feature (987)..(987): n is a, c, g, or t
  misc_feature (993)..(993): n is a, c, g, or t
  misc_feature (996)..(996): n is a, c, g, or t
  misc_feature (1039)..(1039): n is a, c, g, or t
  misc_feature (1042)..(1042): n is a, c, g, or t
  misc_feature (1065)..(1065): n is a, c, g, or t
  misc_feature (1094)..(1094): n is a, c, g, or t
  misc_feature (1096)..(1096): n is a, c, g, or t
  misc_feature (1106)..(1106): n is a, c, g, or t
  misc_feature (1113)..(1113): n is a, c, g, or t
  misc_feature (1117)..(1117): n is a, c, g, or t
  misc_feature (1131)..(1132): n is a, c, g, or t
  misc_feature (1134)..(1135): n is a, c, g, or t
  misc_feature (1137)..(1137): n is a, c, g, or t
  misc_feature (1141)..(1141): n is a, c, g, or t
  misc_feature (1144)..(1144): n is a, c, g, or t
  misc_feature (1151)..(1151): n is a, c, g, or t
  misc_feature (1165)..(1165): n is a, c, g, or t
  misc_feature (1170)..(1170): n is a, c, g, or t
  misc_feature (1176)..(1176): n is a, c, g, or t
  misc_feature (1181)..(1181): n is a, c, g, or t
attagagaaattactatgagaggatcgcatcaccatcaccatcacggatcctatttaggtgacactatagaatcgtcgacccacgcgtccgattgtcggctttcgccaaatcacaaagtcctgcattacggagacttagaagagagtcctcagggagaagtgccccacgattccttgcaggacaaactgccggtggcagatatcaaagccgtggtgacgggaaaggactgccctcatatgaaagagaaaggtgcccttaaacaaaacaaggaggtgcttgaactcgctttctccatcttgtatgactcaaactgccaactgaacttcatcgctcctgacaagcatgagtactgtatctggacggatggactgaatgcgctactcgggaaggacatgatgagcgacctgacgcggaatgacctggacaccctgctcagcatggaaatcaagctccgcctcctggacctggaaaacatccagatccctgacgcacctccgccgattcccaaggagcccagcaactatgacttcgtctatgactgtaactgaagtggccgggcccagacatgccccttccaaaactggaacacctagctaacaggagagaggaatgaaaacacacccacgccttggaaccgtcctttggtaaagggaagctgtgggtccacattcccttcagcatcacctctagccctggcaactttcagcccctagctggcatcttgctcaccgccctgattctgttcctcggctccactgcttcaggtcacttcccatggctgcagtccactggtgggacaagagcaaagcccactgccagtaagaaggccaaagggcccttccatcctagccctctgcaggcatgcccttccttcccttgggcaggaaagccagcagccccagactgcccaaaaacttgccccaccanaccaagggcagtgccccaagggcccctgtctggaggaaatggcctanctattngatganaaaacnaanccccacatcctcctttcccctctctctaaaatcatctcgcacnccngttacccttgaattaaaatctgngctcaaatctcctccccacctctctcccngntttgccttgnctcggtncccnttgggccccaaaannannancccnaanccccccngggatcctcccaanaaaantttccnaaaan

SEQ ID NO: 128 - DNA, 1046 bp, Homo Sapiens
  misc_feature (544)..(544): n is a, c, g, or t
  misc_feature (818)..(818): n is a, c, g, or t
  misc_feature (864)..(864): n is a, c, g, or t
  misc_feature (866)..(866): n is a, c, g, or t
  misc_feature (893)..(893): n is a, c, g, or t
  misc_feature (897)..(897): n is a, c, g, or t
  misc_feature (906)..(906): n is a, c, g, or t
  misc_feature (909)..(909): n is a, c, g, or t
  misc_feature (915)..(915): n is a, c, g, or t
  misc_feature (918)..(918): n is a, c, g, or t
  misc_feature (940)..(940): n is a, c, g, or t
  misc_feature (955)..(955): n is a, c, g, or t
  misc_feature (958)..(958): n is a, c, g, or t
  misc_feature (969)..(969): n is a, c, g, or t
  misc_feature (977)..(977): n is a, c, g, or t
  misc_feature (983)..(983): n is a, c, g, or t
  misc_feature (995)..(995): n is a, c, g, or t
  misc_feature (1014)..(1014): n is a, c, g, or t
  misc_feature (1019)..(1019): n is a, c, g, or t
  misc_feature (1025)..(1046): n is a, c, g, or t
tagagaaattactatgagaggatcgcatcaccatcaccatcacggatcctatttaggtgacactatagaatcgtcgacccacgcgtccgcgggtgacctggccaccagcaggaatgcagcggattcctctgtcccaagtgctcccagaaggcaggattctgaagaccactccagcgatatgttcaactatgaagaatactgcaccgccaacgcagtcactgggccttgccgtgcatccttcccacgctggtactttgacgtggagaggaactcctgcaataacttcatctatggaggctgccggggcaataagaacagctaccgctctgaggaggcctgcatgctccgctgcttccgccagcaggagaatcctcccctgccccttggctcaaaggtggtggttctggcggggctgttcgtgatggtgttgatcctcttcctgggagcctccatggtctacctgatccgggtggcacggaggaaccaggagcgtgccctgcgcaccgtctggagctccggagatgacaaggagcagctggtgaanaacacatatgtcctgtgaccgccctgtcgccaagaggactggggaagggaggggagactatgtgtgagctttttttaaatagagggattgactcggatttgagtgatcattagggctgaggtctgtttctctgggaggtaggacggctgcttcctggtctggcagggatgggtttgctttggaaatcctctaggaggctcctcctcgcatggcctgcagtctggcagcagccccgagttgtttcctcgctgatcgatttctttcctccaggtanagttttctttgcttatgttgaattccattgcctcttttctcatcananaagtgatgttggaatcgtttcctttgnttgnctgatttanggntttttnaantataaacaaaagtttttattancattctgaaaaaagnaantaaaaatgtanaatttaanaaaaangggccttccccntttaaaaaaaaattttcancatgngctttnnnnnnnnnnnnnnnnnnnnnn

SEQ ID NO: 129 - DNA, 1192 bp, Homo Sapiens
  misc_feature (831)..(831): n is a, c, g, or t
  misc_feature (841)..(841): n is a, c, g, or t
  misc_feature (847)..(847): n is a, c, g, or t
  misc_feature (865)..(865): n is a, c, g, or t
  misc_feature (913)..(913): n is a, c, g, or t
  misc_feature (920)..(920): n is a, c, g, or t
  misc_feature (924)..(924): n is a, c, g, or t
  misc_feature (935)..(935): n is a, c, g, or t
  misc_feature (957)..(957): n is a, c, g, or t
  misc_feature (961)..(961): n is a, c, g, or t
  misc_feature (991)..(991): n is a, c, g, or t
  misc_feature (993)..(993): n is a, c, g, or t
  misc_feature (1006)..(1006): n is a, c, g, or t
  misc_feature (1015)..(1015): n is a, c, g, or t
  misc_feature (1020)..(1020): n is a, c, g, or t
  misc_feature (1032)..(1032): n is a, c, g, or t
  misc_feature (1044)..(1044): n is a, c, g, or t
  misc_feature (1052)..(1052): n is a, c, g, or t
  misc_feature (1061)..(1061): n is a, c, g, or t
  misc_feature (1068)..(1068): n is a, c, g, or t
  misc_feature (1071)..(1071): n is a, c, g, or t
  misc_feature (1083)..(1083): n is a, c, g, or t
  misc_feature (1090)..(1090): n is a, c, g, or t
  misc_feature (1122)..(1122): n is a, c, g, or t
  misc_feature (1124)..(1124): n is a, c, g, or t
  misc_feature (1130)..(1130): n is a, c, g, or t
  misc_feature (1138)..(1138): n is a, c, g, or t
  misc_feature (1144)..(1144): n is a, c, g, or t
  misc_feature (1147)..(1147): n is a, c, g, or t
  misc_feature (1149)..(1149): n is a, c, g, or t
  misc_feature (1160)..(1160): n is a, c, g, or t
  misc_feature (1164)..(1164): n is a, c, g, or t
  misc_feature (1167)..(1167): n is a, c, g, or t
  misc_feature (1171)..(1171): n is a, c, g, or t
  misc_feature (1174)..(1174): n is a, c, g, or t
  misc_feature (1178)..(1178): n is a, c, g, or t
  misc_feature (1183)..(1183): n is a, c, g, or t
  misc_feature (1185)..(1185): n is a, c, g, or t
  misc_feature (1187)..(1187): n is a, c, g, or t
  misc_feature (1189)..(1190): n is a, c, g, or t
tagagaaattactatgagaggatcgcatcaccatcaccatcacggatcctatttaggtgacactatagaatcgtcgacccacgcgtccgctgaggacctggccggccccctcccttcctcagtctcttcctcctctacaacctcctccaagccgaagctcaagaagcgcttttccctgcgttcagtgggtcgctctgtccgaggctcagtccgtggcatcctgcagtggcgggggaccgttgaccctccctcctccgctgggcccctggagacctcgtcaggccccccagtcttaggtggaaacagcaactccaactcctctggcggggctgggaccgttggtaggggactggtcagtgatggaacgtcccctggggaaagatggactcaccgttttgagaggctgagactcagtcggggagggggcgccttgaaggatggagcagggatggtgcagagggaagagctgctgagtttcatgggggctgaggaggcagcccctgacccagccggagtgggccggggaggaggggtggctgggcctccttcagggggaggagggcagcctcagtggcagaagtgtcgcctgctgcttcgaagtgaaggagaaggaggaggaggaagtcgcctggagttctttgtaccacccaaggcctctcggccccgactcagcatcccctgctcttctatcacagacgtccggacaaccacagccctggagatgcctgaccgggagaacacgtttgtggttaaggtggaaggtccatccgagtatatcatggagacagtggatgcccagcatgtgaaaggcctgggtgtctgacatccaanaatgcctgancccagnaccctgccctgctaccantccccgccccatgaccctccctctggccctggaactcattccttacanggaaaanacanacagcctgganctgtcctgcctgaatcactcgnaaantctacccagccagaactgctgcttggaccnancaaaacaatgacncctgtccanggggnatatggggcctntaaaacgccctnggatcatntcccaagtntgctcantgncgcctccatttnaatccanggaatgcttccccaaaatgcccccccatcccntnaaaagnaccccaanggaaanttntncctttaacccnaacntcnttgnaantcgnaaaancnangnnct

SEQ ID NO: 130 - DNA, 456 bp, Homo Sapiens
  misc_feature (1)..(3): n is a, c, g, or t
  misc_feature (8)..(9): n is a, c, g, or t
  misc_feature (13)..(13): n is a, c, g, or t
  misc_feature (20)..(20): n is a, c, g, or t
  misc_feature (25)..(25): n is a, c, g, or t
  misc_feature (28)..(28): n is a, c, g, or t
  misc_feature (47)..(47): n is a, c, g, or t
  misc_feature (294)..(294): n is a, c, g, or t
  misc_feature (313)..(313): n is a, c, g, or t
  misc_feature (333)..(333): n is a, c, g, or t
  misc_feature (340)..(340): n is a, c, g, or t
  misc_feature (342)..(342): n is a, c, g, or t
  misc_feature (350)..(350): n is a, c, g, or t
  misc_feature (359)..(359): n is a, c, g, or t
  misc_feature (361)..(361): n is a, c, g, or t
  misc_feature (367)..(367): n is a, c, g, or t
  misc_feature (372)..(372): n is a, c, g, or t
  misc_feature (384)..(385): n is a, c, g, or t
  misc_feature (388)..(388): n is a, c, g, or t
  misc_feature (396)..(396): n is a, c, g, or t
  misc_feature (401)..(401): n is a, c, g, or t
  misc_feature (405)..(405): n is a, c, g, or t
  misc_feature (415)..(415): n is a, c, g, or t
  misc_feature (417)..(417): n is a, c, g, or t
  misc_feature (437)..(437): n is a, c, g, or t
  misc_feature (440)..(442): n is a, c, g, or t
  misc_feature (447)..(447): n is a, c, g, or t
  misc_feature (449)..(449): n is a, c, g, or t
  misc_feature (452)..(452): n is a, c, g, or t
nnnaaaanncaantattttnagggnctntttccctcccatcgggatnctatttaggtgacactatagaatcgtcgacccacgcgtccggcttcacctgctcctgctgctgcctttacaagacgtgccgccgaccacgtccggttgtcaccaccaccacatccaccactgtggtgcatgccccttatcctcagcctccaagtgtgccgcccagctaccctggaccaagctaccagggctaccacaccatgccgcctcagccagggatgccagcagcaccctacccaatgcagtanccaccaccttacccagccnagcccatgggcccaccggcntaccacnanaccctggntggaggagnanccgcgncctancccgccagacannctnattaaaanccggnctanatggatgccncnaaagcggacctctgaagaantcnnntggcntntcnggaa

SEQ ID NO: 131 - DNA, 963 bp, Homo Sapiens
tgagaggatcgcatcaccatcaccatcacggatcctatttaggtgacactatagaatcgtcgacccacgcgtccggacaggttgaactcattcctaatggtgtaaatataccagtcactccacagaatgtatatgagtatgtgcggaaatacgcagaacacagaatgttggtagttgcagaacagcccttacatgcaatgaggaaaggtctactagatgtgcttccaaaaaattcattagaagatttaacggcagaagattttaggcttttggtaaatggctgcggtgaagtcaatgtgcaaatgctgatcagttttacctctttcaatgatgaatcaggagaaaatgctgagaagcttctgcagttcaagcgttggttctggtcaatagtagagaagatgagcatgacagaacgacaagatcttgtttacttttggacatcaagcccatcactgccagccagtgaagaaggattccagcctatgccctcaatcacaataagaccaccagatgaccaacatcttcctactgcaaatacttgcatttctcgactttacgtcccactctattcctctaaacagattctcaaacagaaattgttactcgccattaagaccaagaattttggttttgtgtagagtataaaaagtgtgtattgctgtgtaatattactagcaaattttgtagatttttttccatttgtctataaaagtttatggaagttaatgctgtcatacccccctggtggtaccttaaagagataaaatgcagacattccttgctgagtttatagcttaaaggcctaaggagcactagcaacatttggctatattggtttgctagtcaccaacttctgggtctaaccccagccaaagatgacagcagaacaacataatttacactgtgatttatctttttgctgaggggaaaaaatgtaaatgttctgaaaattcactgctgcct

SEQ ID NO: 132 - DNA, 1264 bp, Homo Sapiens
  misc_feature (845)..(845): n is a, c, g, or t
  misc_feature (872)..(872): n is a, c, g, or t
  misc_feature (883)..(883): n is a, c, g, or t
  misc_feature (964)..(964): n is a, c, g, or t
  misc_feature (978)..(978): n is a, c, g, or t
  misc_feature (980)..(980): n is a, c, g, or t
  misc_feature (1012)..(1012): n is a, c, g, or t
  misc_feature (1024)..(1024): n is a, c, g, or t
  misc_feature (1026)..(1026): n is a, c, g, or t
  misc_feature (1032)..(1032): n is a, c, g, or t
  misc_feature (1054)..(1054): n is a, c, g, or t
  misc_feature (1074)..(1074): n is a, c, g, or t
  misc_feature (1094)..(1094): n is a, c, g, or t
  misc_feature (1101)..(1101): n is a, c, g, or t
  misc_feature (1108)..(1108): n is a, c, g, or t
  misc_feature (1110)..(1110): n is a, c, g, or t
  misc_feature (1132)..(1132): n is a, c, g, or t
  misc_feature (1148)..(1148): n is a, c, g, or t
  misc_feature (1159)..(1159): n is a, c, g, or t
  misc_feature (1161)..(1163): n is a, c, g, or t
  misc_feature (1177)..(1177): n is a, c, g, or t
  misc_feature (1181)..(1181): n is a, c, g, or t
  misc_feature (1190)..(1190): n is a, c, g, or t
  misc_feature (1195)..(1195): n is a, c, g, or t
  misc_feature (1201)..(1201): n is a, c, g, or t
  misc_feature (1208)..(1210): n is a, c, g, or t
  misc_feature (1216)..(1216): n is a, c, g, or t
  misc_feature (1220)..(1220): n is a, c, g, or t
  misc_feature (1225)..(1225): n is a, c, g, or t
  misc_feature (1242)..(1242): n is a, c, g, or t
  misc_feature (1245)..(1246): n is a, c, g, or t
  misc_feature (1249)..(1249): n is a, c, g, or t
tagagaaattactatgagaggatcgcatcaccatcaccatcacggatcctatttaggtgacactatagaatcgtcgacccacgcgtccgctgaaggcttccgcggctttggggccggttgtgagatgccaggcagaggccgctgcccggactgcggctccacggagctggtggaagactcgcactattcgcagagccagctggtgtgctccgactgcggctgcgtggtcaccgagggggtccttaccactaccttcagcgacgagggcaatctccgagaggtaacatattcccgaagcacaggggaaaacgaacaagttagtcgcagccagcaacgaggtctccggcgagtgagagacctttgtcgagttctgcagttgccaccaacatttgaggataccgcggttgcctactaccaacaggcatatcggcactctggcatccgagcggccaggctgcaaaagaaggaggtgttggttgggtgctgcgtcttaatcacctgccgacagcataactggcccctaacaatgggggccatctgcacgctgttgtatgcagatttggatgtgttttctagcacttacatgcagatagtgaagctcctgggactggatgtgccatctctgtgcttggcagaactggtgaagacctattgcagcagcttcaaactgttccaagcttcaccttctgtgccagccaaatacgtggaagacaaagagaagatgctgtctcgaacaatgcagttggtggagctggcaaatgagacgtggctggtgaccgggaggcatcccttgcccgtcatcactgctgcgactttcctggcttggcagtcgctgcagcctgcanatcggctttcatgttcccttgcccgantttgtaaattnggcaaatgtggaccctgccctacccggcgtcctcccccctgcaggaactgctggctgtgctgctgcggaatggctgaacanctggcctggttacnanttctgaaacttgacaaacggtctgtggtgaancaaatcggtgancnttctcnagcaccgccagtcactggtccnctctgcctttcgggatgggnaaacaaaaattggaaacccnaaaaaangaacccncnggggtggggaaaggggccaagnaaaaaggggaaggggnaaaaaatttcntnnngtttaccccagggnaaangggcgggcnaatcntggccnttttttnnncccccngggnggttnaaatcccccaaaagganttnnccngtaacccccgttccc

SEQ ID NO: 133 - DNA, 1331 bp, Homo Sapiens
  misc_feature (1)..(1): n is a, c, g, or t
  misc_feature (906)..(906): n is a, c, g, or t
  misc_feature (913)..(913): n is a, c, g, or t
  misc_feature (926)..(926): n is a, c, g, or t
  misc_feature (930)..(930): n is a, c, g, or t
  misc_feature (976)..(976): n is a, c, g, or t
  misc_feature (978)..(978): n is a, c, g, or t
  misc_feature (1006)..(1006): n is a, c, g, or t
  misc_feature (1028)..(1028): n is a, c, g, or t
  misc_feature (1034)..(1034): n is a, c, g, or t
  misc_feature (1046)..(1046): n is a, c, g, or t
  misc_feature (1075)..(1075): n is a, c, g, or t
  misc_feature (1099)..(1100): n is a, c, g, or t
  misc_feature (1103)..(1103): n is a, c, g, or t
  misc_feature (1112)..(1112): n is a, c, g, or t
  misc_feature (1115)..(1115): n is a, c, g, or t
  misc_feature (1127)..(1127): n is a, c, g, or t
  misc_feature (1129)..(1129): n is a, c, g, or t
  misc_feature (1134)..(1134): n is a, c, g, or t
  misc_feature (1142)..(1142): n is a, c, g, or t
  misc_feature (1148)..(1148): n is a, c, g, or t
  misc_feature (1160)..(1160): n is a, c, g, or t
  misc_feature (1162)..(1162): n is a, c, g, or t
  misc_feature (1168)..(1168): n is a, c, g, or t
  misc_feature (1176)..(1176): n is a, c, g, or t
  misc_feature (1184)..(1184): n is a, c, g, or t
  misc_feature (1186)..(1186): n is a, c, g, or t
  misc_feature (1190)..(1190): n is a, c, g, or t
  misc_feature (1203)..(1203): n is a, c, g, or t
  misc_feature (1219)..(1219): n is a, c, g, or t
  misc_feature (1221)..(1221): n is a, c, g, or t
  misc_feature (1243)..(1243): n is a, c, g, or t
  misc_feature (1256)..(1257): n is a, c, g, or t
  misc_feature (1262)..(1262): n is a, c, g, or t
  misc_feature (1270)..(1270): n is a, c, g, or t
  misc_feature (1288)..(1288): n is a, c, g, or t
  misc_feature (1295)..(1295): n is a, c, g, or t
  misc_feature (1301)..(1301): n is a, c, g, or t
  misc_feature (1305)..(1306): n is a, c, g, or t
  misc_feature (1314)..(1316): n is a, c, g, or t
  misc_feature (1319)..(1320): n is a, c, g, or t
  misc_feature (1322)..(1322): n is a, c, g, or t
  misc_feature (1326)..(1326): n is a, c, g, or t
  misc_feature (1328)..(1328): n is a, c, g, or t
ntaatagagaaattactatgagaggatcgcatcaccatcaccatcacggatcctatttaggtgacactatagaatcgtcgacccacgcgtccgcccacgcgtccggctataaccccaaaggcctctgtgtcctttgtcccaatagtaacaactccctcctggcctttccgggcacgcacacgggccatgtgcagcttgtggacctggccagcacggagaagccacccgtggacattcctgcacacgagggtgtcctgagctgcattgcactcaacctgcagggaacaagaattgcaactgcatccgagaaagggacgcttataagaatatttgatacttcatcagggcatttaatccaggaactgcgaagaggatctcaagcagccaatatttactgcatcaacttcaatcaggatgcgtccctcatctgcgtatccagcgaccacggcacagtgcatatttttgcagctgaagatccaaaaaggaataaacagtccagtttggcctcagccagtttccttccaaaatacttcagttccaagtggagtttctccaagtttcaggttccctcaggctctccgtgcatttgtgcctttggaacagagccaaacgccgtcattgcaatttgtgcagacggcagctactacaaattcctgttcaaccccaagggggagtgcatccgagatgtctacgcgcagtttctagagatgaccgatgacaagctgtgactccagctgggggcgccacagcacccaccacctgccgccttcagactctcggggctggtgccagtgccccaggggcctcctgggccacgggctggagggggctgcccagggaccttggtctcgaagccatacgtggttgtctgctttcctaaggactcccatttccagtattaaaganagaatcntcatcaaggcacngtangtaactcagtggctgtgaccagctcgactggggggccactggctgntnccatgagttcagctgtgaagttagcctncagtggctccgccccatcctcnactganggggggctccanaacgaacctggggactgggctgaaaaggnggaaaaaattcaggtttgtttttnncancaaattccntcntttttaatgaancngcacnggggaatnaaaaantgggcaaaggtnantttttnctggaaanccaaattnanaaancccccccccttgncttaaaaaaggaaaangnaatcctttttcccccccaaatnaaaaaaaaaactnnccctnaaaaaaanaagggggaagtttccccnggggaancccccngggnnttttcccnnnccnnangggntnttg

SEQ ID NO: 134 - DNA, 1345 bp, Homo Sapiens
  misc_feature (904)..(904): n is a, c, g, or t
  misc_feature (906)..(906): n is a, c, g, or t
  misc_feature (983)..(983): n is a, c, g, or t
  misc_feature (999)..(999): n is a, c, g, or t
  misc_feature (1004)..(1004): n is a, c, g, or t
  misc_feature (1012)..(1012): n is a, c, g, or t
  misc_feature (1016)..(1016): n is a, c, g, or t
  misc_feature (1023)..(1023): n is a, c, g, or t
  misc_feature (1045)..(1045): n is a, c, g, or t
  misc_feature (1063)..(1063): n is a, c, g, or t
  misc_feature (1094)..(1094): n is a, c, g, or t
  misc_feature (1101)..(1101): n is a, c, g, or t
  misc_feature (1122)..(1122): n is a, c, g, or t
  misc_feature (1125)..(1125): n is a, c, g, or t
  misc_feature (1134)..(1134): n is a, c, g, or t
  misc_feature (1137)..(1137): n is a, c, g, or t
  misc_feature (1156)..(1156): n is a, c, g, or t
  misc_feature (1159)..(1159): n is a, c, g, or t
  misc_feature (1163)..(1163): n is a, c, g, or t
  misc_feature (1168)..(1170): n is a, c, g, or t
  misc_feature (1177)..(1177): n is a, c, g, or t
  misc_feature (1184)..(1184): n is a, c, g, or t
  misc_feature (1189)..(1189): n is a, c, g, or t
  misc_feature (1192)..(1193): n is a, c, g, or t
  misc_feature (1209)..(1210): n is a, c, g, or t
  misc_feature (1213)..(1213): n is a, c, g, or t
  misc_feature (1224)..(1225): n is a, c, g, or t
  misc_feature (1228)..(1228): n is a, c, g, or t
  misc_feature (1239)..(1239): n is a, c, g, or t
  misc_feature (1260)..(1260): n is a, c, g, or t
  misc_feature (1263)..(1263): n is a, c, g, or t
  misc_feature (1287)..(1287): n is a, c, g, or t
  misc_feature (1293)..(1293): n is a, c, g, or t
  misc_feature (1298)..(1298): n is a, c, g, or t
  misc_feature (1316)..(1316): n is a, c, g, or t
  misc_feature (1319)..(1320): n is a, c, g, or t
  misc_feature (1323)..(1323): n is a, c, g, or t
  misc_feature (1336)..(1337): n is a, c, g, or t
  misc_feature (1343)..(1343): n is a, c, g, or t
agagaaattactatgagaggatcgcatcaccatcaccatcacggatcctatttaggtgacactatagaatcgtcgacccacgcgtccggtgacaatccccaaacggtgtttcctcgctactgtgttagttggatggtttccagtggcatgccagatttcctggagaagctgcacatggccactctgaaagccaagaatatggagattaaagtaaaggactacatctcagctaagcctctggaaatgagtagtgaagccaaggccaccagccagtcctctgagcgaaagaacgagggcagctgtggccctgctcggattgagtatgcttgacaggctttgggataagaagggacaaggtgcttctagccctgtctcagtccgttatcactctgctgtagaagggggacatgccacatgtattagaaggcatctgctgtaacttccagtgcaagataattcaataactgatgtcccatttcattcagagcccttattgctcttatcaaaacagaagaaggctacatttgtgggagtgttgtcatattctcaggccaactgttttgaaattcggtatctcactgagctaatctggaacaaacctctcacctcaggccagaaggggatgacctccatttgcttctctgagtagtttcctctgctgacattccaaatcccaccatcgattgtgcagcgctttggatttccttcagttctccaggtccacctggaaagtatagttggccagttgagtctctcaaatgaggggctactgggagtgctcttggtaacaatcatgatgtgaatgggtgtgaacgatacttggctatgttaagtgccttgtccgcaccttgcttttatctctagagacatgaagttattattaattttttttttttttaagtananatggagtttcactctgtttcccaggctggtcttgaactcctgggccatgcctggccagggacatgaatttgtacaanaaatttccccccctgnctgcncaatatcncccntgactcnccttatccaagcaagttcctgngaatcggccagttctccnaattcatggatcatggccccctcccaacctncccattnacaaaaaactggggaaacaanccntttaaaaanaanctttttgagccccaaaccnccntttnaattnnnttaaaantttttanctttnggnncaaagaattgagaatnnccngattccccccnnccnatgttaaaaancccttttatcgggatattttnaanttcgggtgacttttttttcaaaanaaaaanaaaanggggggggcccccctggntcnnaanaaaaaaggggggnnaaaaantt

SEQ ID NO: 135 - DNA, 1123 bp, Homo Sapiens
  misc_feature (890)..(890): n is a, c, g, or t
  misc_feature (960)..(960): n is a, c, g, or t
  misc_feature (965)..(965): n is a, c, g, or t
  misc_feature (984)..(985): n is a, c, g, or t
  misc_feature (991)..(991): n is a, c, g, or t
  misc_feature (1000)..(1000): n is a, c, g, or t
  misc_feature (1010)..(1010): n is a, c, g, or t
  misc_feature (1017)..(1017): n is a, c, g, or t
  misc_feature (1020)..(1020): n is a, c, g, or t
  misc_feature (1040)..(1040): n is a, c, g, or t
  misc_feature (1042)..(1042): n is a, c, g, or t
  misc_feature (1056)..(1056): n is a, c, g, or t
  misc_feature (1059)..(1059): n is a, c, g, or t
  misc_feature (1068)..(1068): n is a, c, g, or t
  misc_feature (1070)..(1070): n is a, c, g, or t
  misc_feature (1085)..(1085): n is a, c, g, or t
  misc_feature (1094)..(1094): n is a, c, g, or t
  misc_feature (1096)..(1096): n is a, c, g, or t
  misc_feature (1102)..(1102): n is a, c, g, or t
  misc_feature (1104)..(1105): n is a, c, g, or t
  misc_feature (1109)..(1109): n is a, c, g, or t
  misc_feature (1113)..(1113): n is a, c, g, or t
  misc_feature (1116)..(1116): n is a, c, g, or t
  misc_feature (1123)..(1123): n is a, c, g, or t
atagagaaattactatgagaggatcgcatcaccatcaccatcacggatcctatttaggtgacactatagaatcgtcgacccacgcgtccggtttgctgccggagcggagtctccggccggcgtccagtttgagtctaggttggagttggaaccgtggagatgcggaaggaaaccccaccccccctagtgcccccggcggcccgggagtggaatcttcccccaaatgcgcccgcctgcatggaacggcagttggaggctgcgcggtaccggtccgatggggcgcttctcctcggggcctccagcctgagtgggcgctgctgggccggctccctctggctttttaaggacccctgtgccgcccccaacgaaggcttctgctccgccggagtccaaacggaggctggagtggctgacctcacttgggttggggagagaggtattctagtggcctccgattcaggtgctgttgaattgtgggaactagatgagaatgagacacttattgtcagcaagttctgcaagtatgagcatgatgacattgtgtctacagtcagtgtcttgagctctggcacacaagctgtcagtggtagcaaagacatctgcatcaaggtttgggaccttgctcagcaggtggtactgagttcataccgagctcatgctgctcaggtcacttgtgttgctgcctctcctcacaaggactctgtgtttctttcatgcagcgaggacaatagaattttactctgggatacccgctgtcccaagccagcatcacagattggctgcagtgcgcctggctaccttcctacctcgctggcttggcatcctcagcaaagtgaagtctttgtctttggtgatgagaatgggacagtctcccttgtggacaccaagantacaagctgtgtcctgagctcagctgtacactcccagtgtgtcactgggctggtgttctcccccacacantgttnccttcctggcctctctcanngaaaantgctcactngctgtgctgnactcaanccnttttgaattttttaaaaccnancccaaaaaaacttntgnaaaaatgcnanttggtccccgctcantcactcctngntaacananngggntggnacnatcaggn

SEQ ID NO: 136 - DNA, 809 bp, Homo Sapiens
  misc_feature (617)..(617): n is a, c, g, or t
  misc_feature (629)..(629): n is a, c, g, or t
  misc_feature (632)..(632): n is a, c, g, or t
  misc_feature (674)..(674): n is a, c, g, or t
  misc_feature (676)..(676): n is a, c, g, or t
  misc_feature (720)..(720): n is a, c, g, or t
  misc_feature (773)..(773): n is a, c, g, or t
  misc_feature (783)..(783): n is a, c, g, or t
  misc_feature (785)..(785): n is a, c, g, or t
  misc_feature (787)..(787): n is a, c, g, or t
  misc_feature (790)..(790): n is a, c, g, or t
  misc_feature (792)..(792): n is a, c, g, or t
  misc_feature (794)..(794): n is a, c, g, or t
  misc_feature (797)..(797): n is a, c, g, or t
  misc_feature (799)..(799): n is a, c, g, or t
  misc_feature (806)..(809): n is a, c, g, or t
atagagaaattactatgagaggatcgcatcaccatcaccatcacggatcctatttaggtgacactatagaatcgtcgacccacgcgtccgcggagggcatgtcgggccgggagatcgctcagctggccgtgtcctggcaggccacggcgtatgcctccgaggacggggtcctgaccgaggccatgatggacacccgcgtgcaagatgctgtccagcagcaccagcagaagatgtgctggctgaaggcggaagggcctgggcgtggggacgagccctccccatcctgagtccacagggagatccacagctcacggagcctggccgcggacccctcccacccctgccttgccggcccctgcacatttaggatatgctcctggatggggactgggctgtgcccagggcctctgtcccccaggatgtcttgtggtgcgggtcggccgttctgccccccagggcaccccctgttgtaggcactggctagggaggggcaggcctccttcctgcccctcgagacactcttgggagatgcattttccgtctggctcacagggggagggtgaggctttgcaccccagcccctgcccaggccactgtgagggtgggtgctggctgancccccggggcancangagccaggcaggtgatgtctttgttctcggctcccacagcananccaggtgagggggcgcctgccagggccagacccaggtggggcancctgaaccctgcttccccctgtggccggcatgccccgatctttcacacactgntgaccctgananangangnangangnaacctgnnnn

SEQ ID NO: 137 - DNA, 1230 bp, Homo Sapiens
  misc_feature (945)..(945): n is a, c, g, or t
  misc_feature (984)..(984): n is a, c, g, or t
  misc_feature (1000)..(1000): n is a, c, g, or t
  misc_feature (1008)..(1008): n is a, c, g, or t
  misc_feature (1016)..(1016): n is a, c, g, or t
  misc_feature (1024)..(1024): n is a, c, g, or t
  misc_feature (1039)..(1039): n is a, c, g, or t
  misc_feature (1050)..(1050): n is a, c, g, or t
  misc_feature (1054)..(1054): n is a, c, g, or t
  misc_feature (1058)..(1058): n is a, c, g, or t
  misc_feature (1061)..(1061): n is a, c, g, or t
  misc_feature (1063)..(1063): n is a, c, g, or t
  misc_feature (1081)..(1081): n is a, c, g, or t
  misc_feature (1086)..(1086): n is a, c, g, or t
  misc_feature (1096)..(1096): n is a, c, g, or t
  misc_feature (1101)..(1102): n is a, c, g, or t
  misc_feature (1116)..(1116): n is a, c, g, or t
  misc_feature (1124)..(1124): n is a, c, g, or t
  misc_feature (1141)..(1141): n is a, c, g, or t
  misc_feature (1145)..(1145): n is a, c, g, or t
  misc_feature (1148)..(1149): n is a, c, g, or t
  misc_feature (1153)..(1153): n is a, c, g, or t
  misc_feature (1155)..(1155): n is a, c, g, or t
  misc_feature (1167)..(1167): n is a, c, g, or t
  misc_feature (1171)..(1171): n is a, c, g, or t
  misc_feature (1175)..(1175): n is a, c, g, or t
  misc_feature (1180)..(1180): n is a, c, g, or t
  misc_feature (1182)..(1182): n is a, c, g, or t
  misc_feature (1200)..(1200): n is a, c, g, or t
  misc_feature (1205)..(1205): n is a, c, g, or t
  misc_feature (1207)..(1207): n is a, c, g, or t
  misc_feature (1209)..(1209): n is a, c, g, or t
  misc_feature (1220)..(1220): n is a, c, g, or t
  misc_feature (1226)..(1226): n is a, c, g, or t
agagagattactatgagaggatcgcatcaccatcaccatcacggatcctatttaggtgacactatagaatcgtcgacccacgcgtccggcgctgcagccatgcagcccccgcccccgggcccgctgggcgactgcctgcgggactgggaggatctacagcaggacttccagaacatccaggagacccatcggctctaccgcctgaagctggaggagctgaccaaacttcagaacaattgcaccagctccatcacgcggcagaagaagcggctccaggagctggccctcgccctgaagaaatgcaaaccctccctcccagcagaggccgagggggccgcacaggagctggagaaccagatgaaagagcgccaaggcctcttctttgacatggaggcctatttgcctaagaagaatggattgtacctgagcctggttctggggaacgtcaacgtcacgctcctgagcaagcaggctaagtttgcctacaaggacgagtatgagaagttcaagctctacctcaccatcatcctcatcctcatctccttcacttgccgcttcctgctcaactccagggtgacagatgctgccttcaacttcctgctggtctggtactactgcaccctgaccatccgggagagcatcctcatcaacaacggctcccggatcaaaggctggtgggtgttccatcactacgtgtccaccttcctgtcgggagtcatgctgacgtggcccgacggtctcatgtaccagaaattccggaaccaattcctctccttttccatgtaccagagcttcgtgcagtttctccagtactactaccagagcggctgcctctaccgcctgcgggcgctgggcgagcggcacaccatggacctcactgtggagggcttccagtcctggatgtggcggggcctcaccttcctgctgccttttcttttcttgganacttctggcagctttttaacgcgctgacgttgttcaacntggcccagaacctcantgcaagantggcaggngcttatgngcggctttccttccncctcctttccncggnattnttncnccaccctgaggttgggcnccaantttcaaatcncggcnnggaacaaaaagatngaggtggncttccctgcggcccaangggnttnntctntnttttggaaaggnatgnaagnccccncnagggggggttaagggggnctttntntncccttggtttnagggcngggg

SEQ ID NO: 138 - DNA, 1161 bp, Homo Sapiens
  misc_feature (763)..(763): n is a, c, g, or t
  misc_feature (864)..(864): n is a, c, g, or t
  misc_feature (873)..(873): n is a, c, g, or t
  misc_feature (881)..(881): n is a, c, g, or t
  misc_feature (898)..(898): n is a, c, g, or t
  misc_feature (923)..(923): n is a, c, g, or t
  misc_feature (939)..(939): n is a, c, g, or t
  misc_feature (948)..(948): n is a, c, g, or t
  misc_feature (954)..(954): n is a, c, g, or t
  misc_feature (957)..(957): n is a, c, g, or t
  misc_feature (974)..(974): n is a, c, g, or t
  misc_feature (979)..(979): n is a, c, g, or t
  misc_feature (984)..(984): n is a, c, g, or t
  misc_feature (991)..(991): n is a, c, g, or t
  misc_feature (994)..(994): n is a, c, g, or t
  misc_feature (1011)..(1011): n is a, c, g, or t
  misc_feature (1029)..(1029): n is a, c, g, or t
  misc_feature (1041)..(1042): n is a, c, g, or t
  misc_feature (1045)..(1045): n is a, c, g, or t
  misc_feature (1050)..(1050): n is a, c, g, or t
  misc_feature (1058)..(1059): n is a, c, g, or t
  misc_feature (1061)..(1061): n is a, c, g, or t
  misc_feature (1068)..(1068): n is a, c, g, or t
  misc_feature (1075)..(1075): n is a, c, g, or t
  misc_feature (1078)..(1078): n is a, c, g, or t
  misc_feature (1085)..(1085): n is a, c, g, or t
  misc_feature (1088)..(1088): n is a, c, g, or t
  misc_feature (1097)..(1097): n is a, c, g, or t
  misc_feature (1101)..(1101): n is a, c, g, or t
  misc_feature (1105)..(1105): n is a, c, g, or t
  misc_feature (1108)..(1108): n is a, c, g, or t
  misc_feature (1117)..(1117): n is a, c, g, or t
  misc_feature (1125)..(1125): n is a, c, g, or t
  misc_feature (1130)..(1130): n is a, c, g, or t
  misc_feature (1146)..(1146): n is a, c, g, or t
  misc_feature (1148)..(1149): n is a, c, g, or t
  misc_feature (1154)..(1156): n is a, c, g, or t
  misc_feature (1158)..(1159): n is a, c, g, or t
tagagaaattactatgagaggatcgcatcaccatcaccatcacggatcctatttaggtgacactatagaatcgtcgacccacgcgtccgggtctatgaagccgcagcagcgcgagcgcgagacctgccgggaattgtagtctctaagccctcaacgggagctgggggcccggaggtgggagggggtggccgggctcccagtgggtcgcctggggtcgggcagctggctcgagtagggcaagatgtgactgttaagctgagctttttctcccggcctcagcccctagatcagacattctctctcattacccggcgcgtgggaacgggtccacagccccttgtccgccctagaacccccatgggctgccgcccgccgccgcctcggctgccacccaggacacggcagagataagcgcaggaccagacggccaccatgtcaggagactacgaggatgacctctgccggcgggcactcatcctggtctcggacctctgtgcgcgggtccgagatgctgacaccaacgacaggtgccaggagttcaatgaccgaatccgaggctatccccggggtccagatgcagacatctccgtgagcctgctgtcggtcatcgtgacattctgtggcattgtccttctgggtgtctctctcttcgtgtcctggaagttgtgctgggtgccctggcgggacaagggaggctcggcagtgggcggtggccccctgcgcaaagacctaggccctggtgtcgggctggcaggcctggtangcggaggcgggcaccacctggcggctggcctgggtggccatcctctgctgggcggcccacaccaccatgcccatgccgcccaccatccaccctttgctganctgctgganccaggcancctgggggggttctganacccctgaacccctcctacttgganatggactcgtatccanaggctgcancaacancantggccgctggggtcaanccganccaanatccctnaantgcctctgagggggaancaggctctgggttgctcntgctgcccccannggnggggnttgcccanngnccaatcnataaaangtnaaaaccnggnacccattanaagnaacnaancctggcccnaaccctcnccaanaaaatttaactcccancnnaaccnnnannaa

SEQ ID NO: 139 - DNA, 1179 bp, Homo Sapiens
  misc_feature (1)..(1): n is a, c, g, or t
  misc_feature (875)..(875): n is a, c, g, or t
  misc_feature (978)..(978): n is a, c, g, or t
  misc_feature (985)..(985): n is a, c, g, or t
  misc_feature (1000)..(1000): n is a, c, g, or t
  misc_feature (1005)..(1005): n is a, c, g, or t
  misc_feature (1014)..(1014): n is a, c, g, or t
  misc_feature (1019)..(1019): n is a, c, g, or t
  misc_feature (1022)..(1022): n is a, c, g, or t
  misc_feature (1042)..(1042): n is a, c, g, or t
  misc_feature (1052)..(1052): n is a, c, g, or t
  misc_feature (1054)..(1054): n is a, c, g, or t
  misc_feature (1064)..(1064): n is a, c, g, or t
  misc_feature (1069)..(1069): n is a, c, g, or t
  misc_feature (1073)..(1073): n is a, c, g, or t
  misc_feature (1075)..(1075): n is a, c, g, or t
  misc_feature (1082)..(1082): n is a, c, g, or t
  misc_feature (1085)..(1086): n is a, c, g, or t
  misc_feature (1096)..(1096): n is a, c, g, or t
  misc_feature (1106)..(1106): n is a, c, g, or t
  misc_feature (1114)..(1114): n is a, c, g, or t
  misc_feature (1125)..(1125): n is a, c, g, or t
  misc_feature (1132)..(1132): n is a, c, g, or t
  misc_feature (1134)..(1134): n is a, c, g, or t
  misc_feature (1141)..(1141): n is a, c, g, or t
  misc_feature (1147)..(1147): n is a, c, g, or t
  misc_feature (1149)..(1149): n is a, c, g, or t
  misc_feature (1154)..(1154): n is a, c, g, or t
  misc_feature (1160)..(1161): n is a, c, g, or t
  misc_feature (1166)..(1166): n is a, c, g, or t
  misc_feature (1172)..(1172): n is a, c, g, or t
naatagagaaattactatgagaggatcgcatcaccatcaccatcacggatcctatttaggtgacactatagaatcgtcgacccacgcgtccgccttaaccgagatcaacctgtctgactgcaataaggtcactgatcagtgcctgtccttcttcaaacgctgtggaaacatctgtcatattgacctgaggtactgcaagcaagtcaccaaggaaggctgtgagcagttcatagccgagatgtctgtgagtgtccagtttgggcaagtagaagaaaaactcctgcaaaaactgagttagtccaaggataagtatgtaaatacggggcgggctctgggaggggagagactttacaaaaatgagggcttttattttccatttggaacgtgggacaacagaccacaacgcaattccattttgcaagtctttccaagggagaagctgttcaaccacccgtttgggggatgagtgagccgacactttcctttggtctttctgaatcgtaactgcactgctttctggaccatttctaaggcggcctttacaagaagacattcctgtcggagaggagggtggacttcggagaaattctcatactgaagcatgagcttaggagtttctgttagtggtagtggtgttttggacacttcattccttgcaacaccgaggttttgggtgttgacataaagtggaccacacaccacatctgctgccgtcttgacacttttttttgtttggttggttttgttacatcttacattatgcagaactatttttgtacaaattgtttaaaagttatttatgcaaggtttgaatgcataccagtgtttttattgttttgagattgccaattttcctgatttccttaaggtagganagaatttaacgtgtacttcatcgacacaacccatctacaaatgtgcccagatctaacaaagtaggctaaaaccttccacttaaaagcatgttttaactggaanttgaaantctgctttgtacccncaaanttacatgancatgntgnggaaaaatggtaaattatantccaagtaananactctgccangtttncccngnaaaaaantcnnttttcccaantttaaaattncaactccnccctttgcccncaggagntncgccccnccagancncttgnacttannaaatnaatttnaacgggg

SEQ ID NO: 140 - DNA, 1273 bp, Homo Sapiens
  misc_feature (789)..(789): n is a, c, g, or t
  misc_feature (794)..(794): n is a, c, g, or t
  misc_feature (874)..(874): n is a, c, g, or t
  misc_feature (885)..(885): n is a, c, g, or t
  misc_feature (923)..(923): n is a, c, g, or t
  misc_feature (925)..(925): n is a, c, g, or t
  misc_feature (939)..(940): n is a, c, g, or t
  misc_feature (945)..(945): n is a, c, g, or t
  misc_feature (949)..(949): n is a, c, g, or t
  misc_feature (969)..(969): n is a, c, g, or t
  misc_feature (989)..(989): n is a, c, g, or t
  misc_feature (1014)..(1015): n is a, c, g, or t
  misc_feature (1021)..(1021): n is a, c, g, or t
  misc_feature (1036)..(1036): n is a, c, g, or t
  misc_feature (1039)..(1039): n is a, c, g, or t
  misc_feature (1061)..(1061): n is a, c, g, or t
  misc_feature (1065)..(1065): n is a, c, g, or t
  misc_feature (1067)..(1067): n is a, c, g, or t
  misc_feature (1079)..(1079): n is a, c, g, or t
  misc_feature (1088)..(1088): n is a, c, g, or t
  misc_feature (1096)..(1096): n is a, c, g, or t
  misc_feature (1114)..(1114): n is a, c, g, or t
  misc_feature (1118)..(1118): n is a, c, g, or t
  misc_feature (1123)..(1123): n is a, c, g, or t
  misc_feature (1135)..(1135): n is a, c, g, or t
  misc_feature (1138)..(1139): n is a, c, g, or t
  misc_feature (1142)..(1142): n is a, c, g, or t
  misc_feature (1154)..(1154): n is a, c, g, or t
  misc_feature (1156)..(1156): n is a, c, g, or t
  misc_feature (1175)..(1175): n is a, c, g, or t
  misc_feature (1179)..(1180): n is a, c, g, or t
  misc_feature (1182)..(1182): n is a, c, g, or t
  misc_feature (1194)..(1194): n is a, c, g, or t
  misc_feature (1198)..(1198): n is a, c, g, or t
  misc_feature (1208)..(1208): n is a, c, g, or t
  misc_feature (1213)..(1213): n is a, c, g, or t
  misc_feature (1219)..(1219): n is a, c, g, or t
  misc_feature (1222)..(1224): n is a, c, g, or t
  misc_feature (1232)..(1232): n is a, c, g, or t
  misc_feature (1234)..(1235): n is a, c, g, or t
  misc_feature (1246)..(1246): n is a, c, g, or t
  misc_feature (1266)..(1267): n is a, c, g, or t
  misc_feature (1272)..(1272): n is a, c, g, or t
agagagattactatgagaggatcgcatcaccatcaccatcacggatcctatttaggtgacactatagaatcgtcgacccacgcgtccgcggggacgcggagcaggtggccgcggcggggcagctgggccgccagcttggtgcctcggggaccgtctcccgctgctttggtcaccagcccctgcccgcccgacccgctccgttctccggcctgcgagccctgccggccggactttgcgccgcgtccggcgctgctgctgcgctcggggccccgctcggcgccggcggtgaccgggaagcccgcgttaaaggggcaaccgggaccctggcccggtatggctgaagtcagcatcgaccagtccaagctgcctggagtcaaggaagtatgccgagattttgctgtcctggaggaccacaccctggctcacagcctgcaggaacaagagattgagcatcatttggcatcgaacgttcagcggaaccgtttggtccagcatgatctccaggtggctaagcagctccaagaggaagatctgaaagcgcaggcccagctccagaagcgctacaaagaccttgaacaacaagactgtgaaattgctcaggaaattcaggagaagctggctattgaggcagagagacgacgcattcaggagaagaaggatgaggacatagctcgccttttgcaagaaaaggagttacaggaagagaaaaagagaaagaaacactttccagagttccctgcaacccgtgcttatgcagatagttactattatgaagatggaggaatgaanccaanagtgatgaaaagaaactgtatctactccatcacgaatggcccacaagggatcaggaatgttatgatgctgaaattgccanaaaactgcaanaaaagaaaaactttttggctacccaagttggacatganancccgctcaagtaanntcaangatnaaagaaatcgctcgactttntaatggcttgaaagaaaaanaaaactttacaaaaaacccaagganncggganaaaatcttcttttgnaanaaaaaaaacaaaaccccaagtnaaancnaaaaaagctaangaacaaatnccaagtcnaaaaaaaaggataaaccncccnttccnaaaagaaaggcnacnncgncccccccccctntnttaaaaaaggtaaaaatcngaannanctctttttaaancaanaaaattcaangggantttttnaannnaaaacctntnnaaagttttatnaaaatttaaaaccaaaaacnnccttna

SEQ ID NO: 141 - DNA, 826 bp, Homo Sapiens
  misc_feature (101)..(101): n is a, c, g, or t
  misc_feature (300)..(300): n is a, c, g, or t
  misc_feature (305)..(305): n is a, c, g, or t
  misc_feature (351)..(351): n is a, c, g, or t
  misc_feature (412)..(412): n is a, c, g, or t
  misc_feature (414)..(414): n is a, c, g, or t
  misc_feature (432)..(432): n is a, c, g, or t
  misc_feature (457)..(457): n is a, c, g, or t
  misc_feature (503)..(503): n is a, c, g, or t
  misc_feature (511)..(513): n is a, c, g, or t
  misc_feature (541)..(541): n is a, c, g, or t
  misc_feature (550)..(550): n is a, c, g, or t
  misc_feature (584)..(584): n is a, c, g, or t
  misc_feature (590)..(590): n is a, c, g, or t
  misc_feature (602)..(602): n is a, c, g, or t
  misc_feature (615)..(615): n is a, c, g, or t
  misc_feature (629)..(629): n is a, c, g, or t
  misc_feature (638)..(638): n is a, c, g, or t
  misc_feature (647)..(647): n is a, c, g, or t
  misc_feature (652)..(652): n is a, c, g, or t
  misc_feature (684)..(684): n is a, c, g, or t
  misc_feature (687)..(687): n is a, c, g, or t
  misc_feature (703)..(703): n is a, c, g, or t
  misc_feature (715)..(716): n is a, c, g, or t
  misc_feature (744)..(745): n is a, c, g, or t
  misc_feature (749)..(749): n is a, c, g, or t
  misc_feature (752)..(752): n is a, c, g, or t
  misc_feature (754)..(754): n is a, c, g, or t
  misc_feature (757)..(757): n is a, c, g, or t
  misc_feature (764)..(764): n is a, c, g, or t
  misc_feature (777)..(777): n is a, c, g, or t
  misc_feature (787)..(787): n is a, c, g, or t
  misc_feature (797)..(797): n is a, c, g, or t
  misc_feature (800)..(800): n is a, c, g, or t
  misc_feature (805)..(805): n is a, c, g, or t
  misc_feature (811)..(812): n is a, c, g, or t
  misc_feature (815)..(815): n is a, c, g, or t
  misc_feature (819)..(819): n is a, c, g, or t
atttagagaaattactatgagaggatcgcatcaccatcaccatcacggatcctatttaggtgacactatagaatcgtcgacccacgcgtccggccccaagnccagcctctcgccagctgggagtcgcgcgctgcccacctcgctgcccaggcccccgacgccgcggcaggagccccccaagagcgcgggaagccccgtggacctggcgctcccggctcgggcgtggacggggcgggcgccggggcggggcgcgcgtcctcgcgggtctgaatggaagggtcgaggtcgtcgtcggcggcnagcanatcctgaagccagaactccaccccggcgcccgcgccatgcggcggnagaggcatcacgtggggcaaggtggtgtccctgtatgcggtggccgcggggctggccgtgnantgtgtgaggcaggcccancctgccatggtccacgccctcgtgnactgcctgggggagttcgtgcgcaagaccctgtcaacctggctgcngagacgcnnnggatggactgatgtcctcaagtgtgtgntcaacacanaccctggcctccgctcccactggctggtggctgnactctncagcttcagccncttcctgaaaggntgccttcttcgtgntgctgccanagagatganctgcncacctgtcagtggcctcagcctggtcctttgnagnccaactcaagaaggcnctcaacaccccnnaaaacatcttcctcctccccaaccaaannctgnaancnctnttaaacnctcgaaacacccncttaaaactncctttctttnaanaaaanccaagnnccnttcncagaaat

SEQ ID NO: 142 - DNA, 1217 bp, Homo Sapiens
  misc_feature (1)..(1): n is a, c, g, or t
  misc_feature (894)..(894): n is a, c, g, or t
  misc_feature (908)..(908): n is a, c, g, or t
  misc_feature (930)..(930): n is a, c, g, or t
  misc_feature (970)..(970): n is a, c, g, or t
  misc_feature (977)..(977): n is a, c, g, or t
  misc_feature (998)..(998): n is a, c, g, or t
  misc_feature (1005)..(1005): n is a, c, g, or t
  misc_feature (1017)..(1017): n is a, c, g, or t
  misc_feature (1031)..(1031): n is a, c, g, or t
  misc_feature (1035)..(1035): n is a, c, g, or t
  misc_feature (1040)..(1040): n is a, c, g, or t
  misc_feature (1067)..(1067): n is a, c, g, or t
  misc_feature (1071)..(1072): n is a, c, g, or t
  misc_feature (1117)..(1117): n is a, c, g, or t
  misc_feature (1122)..(1122): n is a, c, g, or t
  misc_feature (1127)..(1127): n is a, c, g, or t
  misc_feature (1131)..(1131): n is a, c, g, or t
  misc_feature (1137)..(1137): n is a, c, g, or t
  misc_feature (1145)..(1145): n is a, c, g, or t
  misc_feature (1162)..(1162): n is a, c, g, or t
  misc_feature (1165)..(1165): n is a, c, g, or t
  misc_feature (1167)..(1167): n is a, c, g, or t
  misc_feature (1172)..(1173): n is a, c, g, or t
  misc_feature (1178)..(1178): n is a, c, g, or t
  misc_feature (1183)..(1183): n is a, c, g, or t
  misc_feature (1190)..(1191): n is a, c, g, or t
  misc_feature (1204)..(1204): n is a, c, g, or t
  misc_feature (1206)..(1206): n is a, c, g, or t
  misc_feature (1211)..(1211): n is a, c, g, or t
  misc_feature (1213)..(1213): n is a, c, g, or t
  misc_feature (1215)..(1215): n is a, c, g, or t
naatagagaaattactatgagaggatcgcatcaccatcaccatcacggatcctatttaggtgacactatagaatcgtcgacccacgcgtccgcccacgcgtccggcacgtgttcgcagtcgtttccgcgatgctgcctctgctgcgctgcgtgccccgtgtgctgggctcctccgtcgccggcctccgcgctgccgcgcccgcctcgcctttccggcagctcctgcagccggcaccccggctgtgcacccggcccttcgggctgctcagcgtgcgcgcaggttccgagcggcggccgggcctcctgcggcctcgcggaccctgcgcctgtggctgtggctgcggctcgctgcacaccgacggagacaaagcttttgttgatttcctgagtgatgaaattaaggaggaaagaaaaattcagaagcataaaaccctccctaagatgtctggaggttgggagctggaactgaatgggacagaagcgaaattagtgcggaaagttgccggggaaaaaatcacggtcactttcaacattaacaacagcatcccaccaacatttgatggtgaggaggaaccctcgcaagggcagaaggttgaagaacaggagcctgaactgacatcaactcccaatttcgtggttgaagttataaagaatgatgatggcaagaaggcccttgtgttggactgtcattatccagaggatgaggttggacaagaagacgaggctgagagtgacatcttctctatcagggaagttagctttcagtccactggcgagtctgaatggaaggatactaattatacactcaacacagattccttggactgggccttatatgaccacctaatggatttccttgccgaccgaggggtggacaacacttttgcagatganctggtggagctcancacagccctggagcaccaggantacattactttttcttgaaaacctcaaaagttttgtcaanaacccantaaaaccaaaaaagatgcttnaaaccanaattttcatggnaagctttggccaangaanaaatnctactctgaaactaaaaatgggctttnaaannaataacatcccaaaaatcatgggggaaaaaaaaccaaatttaaantaaangtttngggntcccanttaataanattttttccggaaaaanacnanatttnnaaaanttttnaaaaaannaaaaaaaaaaatngnttttncncncc

SEQ ID NO: 143 - DNA, 1291 bp, Homo Sapiens
  misc_feature (851)..(851): n is a, c, g, or t
  misc_feature (857)..(857): n is a, c, g, or t
  misc_feature (872)..(872): n is a, c, g, or t
  misc_feature (887)..(887): n is a, c, g, or t
  misc_feature (893)..(893): n is a, c, g, or t
  misc_feature (914)..(914): n is a, c, g, or t
  misc_feature (931)..(931): n is a, c, g, or t
  misc_feature (938)..(938): n is a, c, g, or t
  misc_feature (957)..(957): n is a, c, g, or t
  misc_feature (970)..(970): n is a, c, g, or t
  misc_feature (973)..(973): n is a, c, g, or t
  misc_feature (983)..(983): n is a, c, g, or t
  misc_feature (985)..(985): n is a, c, g, or t
  misc_feature (1007)..(1007): n is a, c, g, or t
  misc_feature (1014)..(1014): n is a, c, g, or t
  misc_feature (1024)..(1024): n is a, c, g, or t
  misc_feature (1060)..(1060): n is a, c, g, or t
  misc_feature (1070)..(1070): n is a, c, g, or t
  misc_feature (1080)..(1080): n is a, c, g, or t
  misc_feature (1092)..(1092): n is a, c, g, or t
  misc_feature (1095)..(1095): n is a, c, g, or t
  misc_feature (1099)..(1099): n is a, c, g, or t
  misc_feature (1109)..(1109): n is a, c, g, or t
  misc_feature (1111)..(1111): n is a, c, g, or t
  misc_feature (1115)..(1116): n is a, c, g, or t
  misc_feature (1123)..(1123): n is a, c, g, or t
  misc_feature (1126)..(1126): n is a, c, g, or t
  misc_feature (1130)..(1131): n is a, c, g, or t
  misc_feature (1139)..(1139): n is a, c, g, or t
  misc_feature (1146)..(1147): n is a, c, g, or t
  misc_feature (1154)..(1154): n is a, c, g, or t
  misc_feature (1165)..(1165): n is a, c, g, or t
  misc_feature (1167)..(1167): n is a, c, g, or t
  misc_feature (1172)..(1172): n is a, c, g, or t
  misc_feature (1176)..(1177): n is a, c, g, or t
  misc_feature (1182)..(1182): n is a, c, g, or t
  misc_feature (1199)..(1199): n is a, c, g, or t
  misc_feature (1210)..(1210): n is a, c, g, or t
  misc_feature (1220)..(1220): n is a, c, g, or t
  misc_feature (1225)..(1225): n is a, c, g, or t
  misc_feature (1242)..(1242): n is a, c, g, or t
  misc_feature (1248)..(1248): n is a, c, g, or t
  misc_feature (1253)..(1253): n is a, c, g, or t
  misc_feature (1263)..(1263): n is a, c, g, or t
  misc_feature (1266)..(1266): n is a, c, g, or t
  misc_feature (1273)..(1273): n is a, c, g, or t
  misc_feature (1275)..(1275): n is a, c, g, or t
  misc_feature (1278)..(1278): n is a, c, g, or t
caaatagagagaattactatgagaggatcgcatcaccatcaccatcacggatcctatttaggtgacactatagaatcgtcgacccacgcgtccgcggggctatatcggggaatggctgcccctatcatcggggtcactcccatgtttgccgtgtgcttctttgggtttggtttggggaagaaactacaacagaaacacccagaagatgtgctcagctatccccagctttttgcagctgggatgttatctggcgtattcaccacaggaatcatgactcctggagaacggatcaagtgcttattacagattcaggcttcttcaggagaaagcaagtacactggtaccttggactgtgcaaagaagctgtaccaggagtttgggatccgaggcatctacaaagggactgtgcttacccttatgcgagatgtcccagctagtggaatgtatttcatgacatatgaatggctgaaaaatatcttcactccggagggaaagagggtcagtgagctcagtgcccctcggatcttggtggctgggggcattgcagggatcttcaactgggctgtggcaatccccccagatgtgctcaagtctcgattccagactgcacctcctgggaaatatcctaatggtttcagagatgtgctgagggagctgatccgggatgaaggagtcacatccttgtacaaagggttcaatgcagtgatgatccgagccttcccagccaatgcggcctgtttccttggctttgaagttgccatgaagttccttaattgggccacccccaacttgtgaggttgaaggctgctcaagttcacttctggatgctggaagctgtcgttgaggagaangagtanttaagcagaactaancagtcttggagggcnaggggnaggggaatggtgaaatccganccctgtgcatggaactnggtgaanactgttgcccttaaatganatccctgccccgnggnaaaacttaangngtcattttgaaacttgaattcnttccttntcaatttaangggaatcttaaaaaggattttggaaaatggaacaantaactttccnaaaccaaaanctacctgggggnaanaaancctccaaccnanttanntgctggnccnaccnnaaccaaantattccnnataaaanaaaaaatcccngnttccncggnnggccngggcaaattttcccccnatccccggagntgaaaatttnttccnccccaaccagaaaaccntttttnttccnggggcccccnaanccggggntnaantgggaaaaagaat

SEQ ID NO: 144 - DNA, 876 bp, Homo Sapiens
  misc_feature (268)..(268): n is a, c, g, or t
  misc_feature (338)..(339): n is a, c, g, or t
  misc_feature (343)..(343): n is a, c, g, or t
  misc_feature (349)..(349): n is a, c, g, or t
  misc_feature (445)..(445): n is a, c, g, or t
  misc_feature (539)..(539): n is a, c, g, or t
  misc_feature (562)..(562): n is a, c, g, or t
  misc_feature (565)..(565): n is a, c, g, or t
  misc_feature (578)..(578): n is a, c, g, or t
  misc_feature (581)..(581): n is a, c, g, or t
  misc_feature (660)..(661): n is a, c, g, or t
  misc_feature (672)..(672): n is a, c, g, or t
  misc_feature (711)..(711): n is a, c, g, or t
  misc_feature (720)..(721): n is a, c, g, or t
  misc_feature (747)..(747): n is a, c, g, or t
  misc_feature (749)..(749): n is a, c, g, or t
  misc_feature (754)..(754): n is a, c, g, or t
  misc_feature (759)..(759): n is a, c, g, or t
  misc_feature (763)..(763): n is a, c, g, or t
  misc_feature (781)..(781): n is a, c, g, or t
  misc_feature (791)..(791): n is a, c, g, or t
  misc_feature (796)..(796): n is a, c, g, or t
  misc_feature (814)..(814): n is a, c, g, or t
  misc_feature (816)..(816): n is a, c, g, or t
  misc_feature (837)..(837): n is a, c, g, or t
  misc_feature (844)..(844): n is a, c, g, or t
  misc_feature (850)..(850): n is a, c, g, or t
  misc_feature (857)..(857): n is a, c, g, or t
  misc_feature (860)..(862): n is a, c, g, or t
  misc_feature (869)..(870): n is a, c, g, or t
  misc_feature (874)..(874): n is a, c, g, or t
agagattactatgagaggatcgcatcaccatcaccatcacggatcctatttaggtgacactatagaatcgtcgacccacgcgtccgcggacgcgtgggcgcgcggccccggcgccccacgcgcgcgcgtcgttctcccgcccgctcgctccccggcgctcacacctgagctcactcgcgcacgcccgcccggcccgagaaccgcgccgccgcctcggccccgcggaagccccgccgcgccatgtcttcgcctcccgaagggaaactanagactaaagctggacacccgcccgccgtgaaagctggtggaatgcgaattgtgcagaaacacccacatanngganacaccnaagaagagaaagacaaggatgaccaggaatgggaaagccccagtccacctaaacccactgtgttcatctctggggtcatcgcccggggtgacaaanatttccccccggcggctgcgcaggtggctcaccagaagccgcatgcctccatggacaagcatccttccccaagaacccagcacatccagcagcnacgcaagtgagcctggagtccancancctgccccatggnccnggctctgctgcacttggtatttccctgacagagagaaccagtagtttctccaaaatcctaactctgctgggatatctanngcaaaaccaanatgctctgtcctttgccttacatttccatatttaaaaantagaaacanntccgagcccaaaccttgtttatgggnantctgntttgnatgncatttgaggataattgtnccccttaaangtgcnattaacaagaattttgcnanaatccgaaaaaaaatttttancttttanttttantttcatnaannnacttgannttcntt

SEQ ID NO: 145 - DNA, 1077 bp, Homo Sapiens
  misc_feature (673)..(673): n is a, c, g, or t
  misc_feature (730)..(730): n is a, c, g, or t
  misc_feature (745)..(745): n is a, c, g, or t
  misc_feature (826)..(826): n is a, c, g, or t
  misc_feature (867)..(867): n is a, c, g, or t
  misc_feature (880)..(880): n is a, c, g, or t
  misc_feature (893)..(893): n is a, c, g, or t
  misc_feature (905)..(905): n is a, c, g, or t
  misc_feature (915)..(915): n is a, c, g, or t
  misc_feature (918)..(918): n is a, c, g, or t
  misc_feature (934)..(935): n is a, c, g, or t
  misc_feature (954)..(954): n is a, c, g, or t
  misc_feature (957)..(957): n is a, c, g, or t
  misc_feature (978)..(978): n is a, c, g, or t
  misc_feature (997)..(999): n is a, c, g, or t
  misc_feature (1001)..(1002): n is a, c, g, or t
  misc_feature (1005)..(1005): n is a, c, g, or t
  misc_feature (1011)..(1011): n is a, c, g, or t
  misc_feature (1028)..(1028): n is a, c, g, or t
  misc_feature (1054)..(1054): n is a, c, g, or t
  misc_feature (1060)..(1060): n is a, c, g, or t
  misc_feature (1063)..(1063): n is a, c, g, or t
  misc_feature (1067)..(1068): n is a, c, g, or t
  misc_feature (1076)..(1076): n is a, c, g, or t
agagaaattactatgagaggatcgcatcaccatcaccatcacggatcctatttaggtgacactatagaatcgtcgacccacgcgtccgggtcggtgggttcccgtgcggcggcggccaaggaggaggagacacagttggagcagctccgtgggctgactggggcgaggcctcagcagcgcgagcttgagtgcggccgagcctgcggcgccttcccctgcgggtggggacgagcgggccccgcggcgtcatcggcggcgaggagccgccgcgcctcggcctagcatgtcggaagcgggcgaggagcagcccatggagacgacgggcgccaccgagaacggacatgaggccgtccccgaaggcgagtcgccggccggggctggcacgggcgccgcggcgggggctggaggcgcgaccgcggcgcccccgagcgggaatcagaacggcgccgagggcgaccagatcaacgccagcaagaacgaggaggacgcgggaaaaatgttcgttggtggcctgagctgggatactagcaaaaaagatttaaaagactattttactaaatttggagaggtcgttgactgtacaataaaaatggatcccaacactggacggtcaagagggtttgggtttatcctgttcaaagatgcagccagtgtggagaaggtcctagaccanaaggagcacaggctggatggccgtgtcattgaccctaaaaaggccatggctatgaanaaggacccggtgaanaaaatcttcgttgggggtctgaatcctgaagccactgaggaaaagatcagggagtactttggcgagtttggggagattgangccattgaattgccaatggatccaaagttgaacaaaaaacnaggttttgtgttnatcacctttaaanaaaaaaaacccntgaaaaaagnttnttggaaaaaaaaattnnatacttttcattggaaacnaantgtgaaattaaagtgggcccnaccccaaaaaaattttttnnncnncanccattntggtttttgggggcccntggaaaaccccaacccaaggaaaccnaagcanccnaaanntggttgtng

SEQ ID NO: 146 - DNA, 1124 bp, Homo Sapiens
  misc_feature (1)..(1): n is a, c, g, or t
  misc_feature (843)..(843): n is a, c, g, or t
  misc_feature (871)..(871): n is a, c, g, or t
  misc_feature (877)..(877): n is a, c, g, or t
  misc_feature (903)..(903): n is a, c, g, or t
  misc_feature (914)..(914): n is a, c, g, or t
  misc_feature (944)..(944): n is a, c, g, or t
  misc_feature (959)..(959): n is a, c, g, or t
  misc_feature (973)..(973): n is a, c, g, or t
  misc_feature (1003)..(1003): n is a, c, g, or t
  misc_feature (1010)..(1010): n is a, c, g, or t
  misc_feature (1062)..(1062): n is a, c, g, or t
  misc_feature (1080)..(1080): n is a, c, g, or t
  misc_feature (1091)..(1091): n is a, c, g, or t
  misc_feature (1094)..(1094): n is a, c, g, or t
  misc_feature (1102)..(1102): n is a, c, g, or t
  misc_feature (1104)..(1105): n is a, c, g, or t
  misc_feature (1107)..(1124): n is a, c, g, or t
naatagagaaattactatgagaggatcgcatcaccatcaccatcacggatcctatttaggtgacactatagaatcgtcgacccacgcgtccggcgccggggtccgagtcccacgaagccccggcccgagccgccggatgcccgcgcgcagcggggcccagttttgccgacggatggggcaaaagaagcagcgaccagctagagcagggcagccacacagctcgtccgacgcagcccaggcacctgcagagcagccacacagctcgtccgatgcagcccaggcaccttgccccagggagcgctgcttgggaccgcccaccactccgggcccataccgcagcatctatttctcaagcccaaagggccaccttacccgactggggttggagttcttcgaccagccggcagtccccctggcccgggcatttctgggacaggtcctagtccggcgacttcctaatggcacagaactccgaggccgcatcgtggagaccgaggcatacctggggccagaggatgaagccgcccactcaaggggtggccggcagaccccccgcaaccgaggcatgttcatgaagccggggaccctgtacgtgtacatcatttacggcatgtacttctgcatgaacatctccagccagggggacggggcttgcgtcttgctgcgagcactggagcccctggaaggtctggagaccatgcgtcagcttcgcagcaccctccggaaaggcaccgccagccgtgtcctcaaggaccgcgagctctgcagtggcccctccaagctgtgccaggccctggccatcaacaagagctttgaccagagggacctggcacaggatgaagntgtatggctggagcgtggtcccctggancccaantgaacccggctgtaattggcaagcancccgggtgggncgtcggccatgcaggggaattgggcccggnaaacccttccgcttntattttccgggcancccctggttcattgtggtcaaaaaattggntgaacangaaaaaaaggccttgaacaaaagggcctgcccaaaaaaaatttttttaattntttaaaaaccaaaaaaanttttttttttntanaaaaaaanannannnnnnnnnnnnnnnnnn

SEQ ID NO: 147 - DNA, 1254 bp, Homo Sapiens
  misc_feature (1)..(1): n is a, c, g, or t
  misc_feature (778)..(778): n is a, c, g, or t
  misc_feature (846)..(846): n is a, c, g, or t
  misc_feature (875)..(875): n is a, c, g, or t
  misc_feature (902)..(902): n is a, c, g, or t
  misc_feature (919)..(919): n is a, c, g, or t
  misc_feature (939)..(939): n is a, c, g, or t
  misc_feature (968)..(968): n is a, c, g, or t
  misc_feature (1005)..(1005): n is a, c, g, or t
  misc_feature (1014)..(1014): n is a, c, g, or t
  misc_feature (1018)..(1019): n is a, c, g, or t
  misc_feature (1024)..(1024): n is a, c, g, or t
  misc_feature (1026)..(1026): n is a, c, g, or t
  misc_feature (1034)..(1035): n is a, c, g, or t
  misc_feature (1045)..(1045): n is a, c, g, or t
  misc_feature (1047)..(1047): n is a, c, g, or t
  misc_feature (1067)..(1067): n is a, c, g, or t
  misc_feature (1071)..(1071): n is a, c, g, or t
  misc_feature (1075)..(1075): n is a, c, g, or t
  misc_feature (1096)..(1096): n is a, c, g, or t
  misc_feature (1112)..(1112): n is a, c, g, or t
  misc_feature (1115)..(1115): n is a, c, g, or t
  misc_feature (1129)..(1129): n is a, c, g, or t
  misc_feature (1143)..(1143): n is a, c, g, or t
  misc_feature (1156)..(1156): n is a, c, g, or t
  misc_feature (1159)..(1160): n is a, c, g, or t
  misc_feature (1171)..(1171): n is a, c, g, or t
  misc_feature (1178)..(1178): n is a, c, g, or t
  misc_feature (1182)..(1182): n is a, c, g, or t
  misc_feature (1185)..(1185): n is a, c, g, or t
  misc_feature (1190)..(1191): n is a, c, g, or t
  misc_feature (1195)..(1195): n is a, c, g, or t
  misc_feature (1197)..(1197): n is a, c, g, or t
  misc_feature (1205)..(1205): n is a, c, g, or t
  misc_feature (1207)..(1207): n is a, c, g, or t
  misc_feature (1213)..(1213): n is a, c, g, or t
  misc_feature (1226)..(1226): n is a, c, g, or t
  misc_feature (1231)..(1232): n is a, c, g, or t
  misc_feature (1236)..(1236): n is a, c, g, or t
  misc_feature (1248)..(1248): n is a, c, g, or t
naatagagaaattactatgagaggatcgcatcaccatcaccatcacggatcctatttaggtgacactatagaatcgtcgacccacgcgtccgcgacccccgagtacctggctgggcactacatgctgcagggagcctccagcatgttgcccgtcatggccttggcaccccaggaacatgagcggatcctggacatgtgttgtgcccctggaggaaagaccagctacatggcccagctgatgaagaacacgggtgtgatccttgccaatgacgccaatgctgagcggctcaagagtgttgtgggcaacttgcatcggctgggagtcaccaacaccattatcagccactatgatgggcgccagttccccaaggtggtggggggctttgaccgagtactgctggatgctccctgcagtggcactggggtcatctccaaggatccagccgtgaagactaacaaggatgagaaggacatcctgcgctgtgctcacctccagaaggagttgctcctgagtgctattgactctgtcaatgcgacctccaagacaggaggctacctggtttactgcacctgttctatcacagtagaagagaatgagtgggtggtagactatgctctgaaaaagaggaatgtgcgactggtgcccacgggcctagactttggccaggaaggttttacccgctttcgagaaaggcgcttccaccccagtctgcgttctacccgacgcttctaccctcatacccacaatatggatgggttcttcattgccaagttcaanaaattttccaattctatccctcagtcccagacaggaaatttctgaaacagccacacctacaaatgtanacttgcctcaggtcatccccaagtctganaacagcaacccagcccagccaagaaanccaagggggctgcaaangacaaaagcagcagctgcanaaaacagcaaaatcccaaaaaaggcctcnttccaaaacctgaatggcatctccaaaggggcaaacncaaaaattntccnntgtancnttttttcnnaaaacccaancnttccctccaccttccagganaaanaatncaccccacctggaaaaacccnaaagggatcagggganccnaaggtggactgggnaacctaaagcaacnattccctaaattncanncctccaaaaanttttttnctcnagnaaaanncccntnccaagggnanaaaaanaaaaaaccggttngtttnncccntccaaaaacttngccccc

SEQ ID NO: 148 - DNA, 1039 bp, Homo Sapiens
  misc_feature (3)..(9): n is a, c, g, or t
  misc_feature (12)..(12): n is a, c, g, or t
  misc_feature (845)..(845): n is a, c, g, or t
  misc_feature (911)..(911): n is a, c, g, or t
  misc_feature (918)..(918): n is a, c, g, or t
  misc_feature (935)..(935): n is a, c, g, or t
  misc_feature (969)..(969): n is a, c, g, or t
  misc_feature (976)..(976): n is a, c, g, or t
  misc_feature (1021)..(1022): n is a, c, g, or t
  misc_feature (1024)..(1031): n is a, c, g, or t
  misc_feature (1033)..(1033): n is a, c, g, or t
  misc_feature (1035)..(1039): n is a, c, g, or t
ttnnnnnnnccnatagagaaattactatgagaggatcgcatcaccatcaccatcacggatcctatttaggtgacactatagaatcgtcgacccacgcgtccgacctcaccagatatgtccaaaatactaaaatgcgccggcaatgaagatatcattacactaagggccgaagataacgcggataccttggcgctagtatttgaagcaccaaaccaggagaaagtttcagactatgaaatgaagttgatggatttagatgttgaacaacttggaattccagaacaggagtacagctgtgtagtaaagatgccttctggtgaatttgcacgtatatgccgagatctcagccatattggagatgctgttgtaatttcctgtgcaaaagacggagtgaaattttctgcaagtggagaacttggaaatggaaacattaaattgtcacagacaagtaatgtcgataaagaggaggaagctgttaccatagagatgaatgaaccagttcaactaacttttgcactgaggtacctgaacttctttacaaaagccactccactctcttcaacggtgacactcagtatgtctgcagatgtaccccttgttgtagagtataaaattgcggatatgggacacttaaaatactacttggctcccaagatcgaggatgaagaaggatcttaggcattcttaaaattcaagaaaataaaactaagctctttgagaactgcttctaagatgccagcatatactgaagtcttttctgtcaccaaatttgtacctctaagtacatatgtagatattgttttctgtaaataacctatttttttctctattctctgcaaatttgnttaaagaataaagtcccaaagtcagatctggtctagttaaccctagaaagtatttttgtctcttanaaatacnttgtgaatttttataanacaaaaagggtcctggactctaaatgcagttttnaaagaantggttttttgaatttaaaataaagttaccttgaaatttcccaaannannnnnnnnanannnnn

SEQ ID NO: 149 - DNA, 607 bp, Homo Sapiens
  misc_feature (604)..(604): n is a, c, g, or t
  misc_feature (607)..(607): n is a, c, g, or t
tagagaaattactatgagaggatcgcatcaccatcaccatcacggatcctatttaggtgacactatagaatcgtcgacccacgcgtccgccgagctggttggtggcggcggtcgtgcggacgcaaacatgcagatctttgtgaagaccctcactggcaaaaccatcacccttgaggtcgagcccagtgacaccattgagaatgtcaaagccaaaattcaagacaaggagggtatcccacctgaccagcagcgtctgatatttgccggcaaacagctggaggatggccgcactctctcagactacaacatccagaaagagtccaccctgcacctggtgttgcgcctgcgaggtggcattattgagccttctctccgccagcttgcccagaaatacaactgcgacaagatgatctgccgcaagtgctatgctcgccttcaccctcgtgctgtcaactgccgcaagaagaagtgtggtcacaccaacaacctgcgtcccaagaagaaggtcaaataaggttgttctttccttgaagggcagcctcctgcccaggccccgtggccctggagcctcaataaagtgtccctttcattgactggagcagcnaan

SEQ ID NO: 150 - DNA, 526 bp, Homo Sapiens
  misc_feature (282)..(282): n is a, c, g, or t
  misc_feature (285)..(285): n is a, c, g, or t
  misc_feature (314)..(314): n is a, c, g, or t
  misc_feature (321)..(321): n is a, c, g, or t
  misc_feature (324)..(324): n is a, c, g, or t
  misc_feature (335)..(335): n is a, c, g, or t
  misc_feature (338)..(338): n is a, c, g, or t
  misc_feature (351)..(351): n is a, c, g, or t
  misc_feature (359)..(360): n is a, c, g, or t
  misc_feature (365)..(365): n is a, c, g, or t
  misc_feature (367)..(367): n is a, c, g, or t
  misc_feature (373)..(373): n is a, c, g, or t
  misc_feature (386)..(386): n is a, c, g, or t
  misc_feature (393)..(393): n is a, c, g, or t
  misc_feature (399)..(400): n is a, c, g, or t
  misc_feature (405)..(405): n is a, c, g, or t
  misc_feature (410)..(410): n is a, c, g, or t
  misc_feature (415)..(415): n is a, c, g, or t
  misc_feature (418)..(418): n is a, c, g, or t
  misc_feature (422)..(422): n is a, c, g, or t
  misc_feature (435)..(435): n is a, c, g, or t
  misc_feature (437)..(437): n is a, c, g, or t
  misc_feature (441)..(441): n is a, c, g, or t
  misc_feature (453)..(453): n is a, c, g, or t
  misc_feature (472)..(472): n is a, c, g, or t
  misc_feature (481)..(481): n is a, c, g, or t
  misc_feature (484)..(484): n is a, c, g, or t
  misc_feature (487)..(487): n is a, c, g, or t
  misc_feature (493)..(494): n is a, c, g, or t
  misc_feature (504)..(504): n is a, c, g, or t
  misc_feature (508)..(508): n is a, c, g, or t
caatagagaaattactatgagaggatcgcatcaccatcaccatcacggatcctatttaggtgacactatagaatcgtcgacccacgcgtccgggccaggcgaagcccacgacgttgacatgccggagatccgcctccgccatgtcgtgtcctgcagcagccaggactcgactcactgtgcagaaaatcttctcaaggcagacacttaccgaaaatggcgggcagccaaggcaggcgagaagaccatctctgtggtcctacagttggagaaggaggagcaganacncagtgtgaacattgggaatgatggctcanctttcgngangtgctggtggncanttcaactgaagcnctggggannaaaantntaaggncccttttgggccncccattnttttanntcccntttcnaaaanccncagngggttaaaacccnancccnggtttcccattnttttgggcccttaaaaaantttgttccnggnacncccccnnaaaaaacctnttgnaaccccgggttaaaattt

SEQ ID NO: 151 - DNA, 888 bp, Homo Sapiens
catcaccatcaccatcacggatcctatttaggtgacactatagaatcgtcgacccacgcgtccgagacgctgtaccccttcagctcagtcaccgaggaggagctcaacttcgagaagggggagaccatggaggtgattgagaagccggagaacgaccccgagtggtggaaatgcaaaaatgcccggggccaggtgggcctcgtccccaaaaactacgtggtggtcctcagtgacgggcctgccctgcaccctgcgcacgccccacagataagctacaccgggccctcgtccagcgggcgcttcgcgggcagagagtggtactacgggaacgtgacgcggcaccaggccgagtgcgccctcaacgagcggggcgtggagggcgacttcctcattagggacagcgagtcctcgcccagcgacttctccgtgtcccttaaagcgtcagggaagaacaaacacttcaaggtgcagctcgtggacaatgtctactgcattgggcagcggcgcttccacaccatggacgagctggtggaacactacaaaaaggcgcccatcttcaccagcgagcacggggagaagctctacctcgtcagggccctgcagtgacggcgccccggccccacactcgcctcccgggccccacggtggagctgcccgcccggccttgtggcagaggctcctcccgcggggacggccccgacggcttctctgcgagtctctctttatgttcaggtcgcttggtcggttcgtctcccatttgccatccaggcctcacacccacactcgagcccacccggccggccagctttagaggaggggaggagcaggcgagttcacattattccttttccatcggaagtggcgctcgtgcattcaactcgttcccgc

SEQ ID NO: 152 - DNA, 1028 bp, Homo Sapiens
  misc_feature (1)..(3): n is a, c, g, or t
  misc_feature (5)..(7): n is a, c, g, or t
  misc_feature (9)..(12): n is a, c, g, or t
  misc_feature (16)..(19): n is a, c, g, or t
  misc_feature (22)..(23): n is a, c, g, or t
  misc_feature (26)..(30): n is a, c, g, or t
  misc_feature (36)..(36): n is a, c, g, or t
  misc_feature (38)..(38): n is a, c, g, or t
  misc_feature (41)..(41): n is a, c, g, or t
  misc_feature (43)..(43): n is a, c, g, or t
  misc_feature (63)..(63): n is a, c, g, or t
  misc_feature (858)..(858): n is a, c, g, or t
  misc_feature (865)..(865): n is a, c, g, or t
  misc_feature (872)..(872): n is a, c, g, or t
  misc_feature (896)..(896): n is a, c, g, or t
  misc_feature (933)..(933): n is a, c, g, or t
  misc_feature (958)..(958): n is a, c, g, or t
  misc_feature (964)..(964): n is a, c, g, or t
  misc_feature (972)..(972): n is a, c, g, or t
  misc_feature (977)..(977): n is a, c, g, or t
  misc_feature (980)..(980): n is a, c, g, or t
  misc_feature (988)..(988): n is a, c, g, or t
  misc_feature (998)..(998): n is a, c, g, or t
  misc_feature (1006)..(1007): n is a, c, g, or t
  misc_feature (1014)..(1014): n is a, c, g, or t
  misc_feature (1016)..(1016): n is a, c, g, or t
  misc_feature (1027)..(1027): n is a, c, g, or t
nnncnnnannnnattnnnngannttnnnnncccatnanggntnctatttaggtgacactatanaatcgtcgacccacgcgtccgcgctggttttagctcccggcgtctgcaaaatgaagattgaggaggtgaagagcactacgaagacgcagcgcatcgcctcccacagccacgtgaaagggctggggctggacgagagcggcttggccaagcaggcggcctcagggcttgtgggccaggagaacgcgcgagaggcatgtggcgtcatagtagaattaatcaaaagcaagaaaatggctggaagagctgtcttgttggcaggacctcctggaactggcaagacagctctggctctggctattgctcaggagctgggtagtaaggtccccttctgcccaatggtggggagtgaagtttactcaactgagatcaagaagacagaggtgctgatggagaacttccgcagggccattgggctgcgaataaaggagaccaaggaagtttatgaaggtgaagtcacagagctaactccgtgtgagacagagaatcccatgggaggatatggcaaaaccattagccatgtgatcataggactcaaaacagccaaaggaaccaaacagttgaaactggaccccagcatttttgaaagtttgcagaaagagcgagtagaagctggagatgtgatttacattgaagccaacagtggggccgtgaagaggcagggcaggtgtgatacctatgccacagaattcgaccttgaagctgaagagtatgtccccttgccaaaaggggatgtgcacaaaaagaaagaaatcctcccaagatgtgaccttgcatgacttggatgtggctaatgcncgccccnagggggnacaagatatcctgtccatgatggnccaacttatgaaaccccaaaaaaaacagaaatccccngaccaactttccgaggggaaattantaaggnggttgaanaattnacnccacccanggcattgctnaacctggnncccgggngngcttttttttna

SEQ ID NO: 153 - DNA, 1264 bp, Homo Sapiens
  misc_feature (1)..(1): n is a, c, g, or t
  misc_feature (3)..(3): n is a, c, g, or t
  misc_feature (858)..(858): n is a, c, g, or t
  misc_feature (873)..(873): n is a, c, g, or t
  misc_feature (956)..(956): n is a, c, g, or t
  misc_feature (988)..(988): n is a, c, g, or t
  misc_feature (995)..(995): n is a, c, g, or t
  misc_feature (997)..(997): n is a, c, g, or t
  misc_feature (1015)..(1015): n is a, c, g, or t
  misc_feature (1034)..(1034): n is a, c, g, or t
  misc_feature (1037)..(1037): n is a, c, g, or t
  misc_feature (1057)..(1057): n is a, c, g, or t
  misc_feature (1061)..(1061): n is a, c, g, or t
  misc_feature (1064)..(1064): n is a, c, g, or t
  misc_feature (1069)..(1069): n is a, c, g, or t
  misc_feature (1071)..(1071): n is a, c, g, or t
  misc_feature (1085)..(1085): n is a, c, g, or t
  misc_feature (1091)..(1091): n is a, c, g, or t
  misc_feature (1094)..(1094): n is a, c, g, or t
  misc_feature (1103)..(1103): n is a, c, g, or t
  misc_feature (1145)..(1145): n is a, c, g, or t
  misc_feature (1150)..(1150): n is a, c, g, or t
  misc_feature (1155)..(1155): n is a, c, g, or t
  misc_feature (1160)..(1160): n is a, c, g, or t
  misc_feature (1163)..(1163): n is a, c, g, or t
  misc_feature (1167)..(1167): n is a, c, g, or t
  misc_feature (1169)..(1169): n is a, c, g, or t
  misc_feature (1178)..(1178): n is a, c, g, or t
  misc_feature (1181)..(1181): n is a, c, g, or t
  misc_feature (1185)..(1185): n is a, c, g, or t
  misc_feature (1195)..(1195): n is a, c, g, or t
  misc_feature (1199)..(1199): n is a, c, g, or t
  misc_feature (1214)..(1214): n is a, c, g, or t
  misc_feature (1217)..(1217): n is a, c, g, or t
  misc_feature (1219)..(1219): n is a, c, g, or t
  misc_feature (1228)..(1228): n is a, c, g, or t
  misc_feature (1235)..(1235): n is a, c, g, or t
  misc_feature (1237)..(1237): n is a, c, g, or t
  misc_feature (1242)..(1242): n is a, c, g, or t
  misc_feature (1246)..(1246): n is a, c, g, or t
  misc_feature (1259)..(1259): n is a, c, g, or t
  misc_feature (1263)..(1264): n is a, c, g, or t
nantagagaaattactatgagaggatcgcatcaccatcaccatcacggatcctatttaggtgacactatagaatcgtcgacccacgcgtccgcagttccagaagccaaagtaacagtgaagacttcaagctcagtggacccagcaatagcagcatggaagatttcactaaacgtagcactcagagtgaggacttctccaggcggcacacggtgccagatagacacatacctcttgctttgccacgacaaaatagtactgggcaggcccagatccgaaaagtggaccagggtgggttaggtgcccgagccaaagccccaccatccctgccacacagtgcttctttacgtagcaccgggagcatgtcagtggtgtccgcagccctggtggccgaacctgtgcagaatgggagccggtcccggcagcagtcctcttcctccagagagagccctgttcccaaagttagagcaatccagagacaacagacacagcaggttcagtcacctgtggactctgccacaatgtccccagtagagaggacagcagcctgggttctgaacaatgggcagtatgaagaggatgtggaagaaactgagcaaaatctagatgaagccaagcatgctgagaagtatgaacaagaaattactaaactgaaggagcgcctgagagtttccagccggcgactggaggaatatgaacgccgcttgctggtgcaggagcagcagatgcagaagctgctgctggaatacaaggcccgactggaggacagcgaggagcggctccgaagacagcaggaagaaaaagatagccagatgaaaagcatcatcagcaggctaatggctgtggaagaggaactgaanaaggatcatgctganatgcaagcagttattgatgcaaagcaaaaaataattgatgcacaggaaaaacggatcgtgtccctggattcagccaacaccanactgatgagcgccctgaaccaagtgaaaggancggtacncntgcaggtccccaatggcntttcccccccaaccccacnagnttttccatccggaaaatggngaanttnaaaanancactgctgacgggntttttntgngaaaggaanaaaaggaaattgacccctcccctatttccaaacttttactanccccnccagnttaanaangttncnatttccaanggnaatnggggaaaaancccngaaagaaaaagaacnttntntttaggganaaggggnanttccngggnaagttttccccantttnn

SEQ ID NO: 154 - DNA, 989 bp, Homo Sapiens
  misc_feature (1)..(1): n is a, c, g, or t
  misc_feature (4)..(4): n is a, c, g, or t
  misc_feature (811)..(811): n is a, c, g, or t
  misc_feature (860)..(860): n is a, c, g, or t
  misc_feature (875)..(875): n is a, c, g, or t
  misc_feature (881)..(882): n is a, c, g, or t
  misc_feature (895)..(895): n is a, c, g, or t
  misc_feature (903)..(903): n is a, c, g, or t
  misc_feature (907)..(907): n is a, c, g, or t
  misc_feature (922)..(922): n is a, c, g, or t
  misc_feature (926)..(926): n is a, c, g, or t
  misc_feature (936)..(936): n is a, c, g, or t
  misc_feature (950)..(951): n is a, c, g, or t
  misc_feature (953)..(953): n is a, c, g, or t
  misc_feature (957)..(957): n is a, c, g, or t
  misc_feature (964)..(964): n is a, c, g, or t
  misc_feature (968)..(968): n is a, c, g, or t
  misc_feature (973)..(973): n is a, c, g, or t
  misc_feature (976)..(976): n is a, c, g, or t
  misc_feature (978)..(978): n is a, c, g, or t
  misc_feature (981)..(981): n is a, c, g, or t
  misc_feature (986)..(987): n is a, c, g, or t
naantagagaaattactatgagaggatcgcatcaccatcaccatcacggatcctatttaggtgacactatagaatcgtcgacccacgcgtccgcccacgcgtccggggatgatgccctgaagaatctctcgcacactcctgtctccaagtttgtcctggaccgaatatttgtctgtgacaagcacaagattcttttctgccagactcccaaagtgggcaacacccagtggaagaaagtgctgattgttctaaatggagcattttcttccattgaggagatccccgaaaacgtggtgcacgaccacgagaagaacggccttcctcggctctcttccttcagtgatgcagaaattcagaagcgattgaaaacatacttcaagttttttattgtaagagatcccttcgaaagacttatttctgcatttaaggataaatttgttcacaatccccggtttgagccttggtacaggcatgagattgctcctggcatcatcagaaaatacaggaggaaccggacagagacgcgggggatccagtttgaagatttcgtgcgctacctcggcgatccgaaccacagatggctagaccttcagtttggggaccacatcattcactgggtgacgtatgtagagctctgtgctccctgtgagataatgtacagtgtgattggacaccacgagaccctggaggacgatgccccatacatcttaaaagaggctggcattgaccacctggtgtcatacccgactatccctccgggcattaccgtgtataacagaaccaaggtggagcactatttcctgggcatcancaaacgagacatccgacgcctgtatgcccgtttcgaaggggactttaanctctttgggtaccanaaaccnnactttttgctaanctaatgcntaanacctatgaattcaanattntttattaaanctgggggctaaccnngngaanatctgancccnaaaangancnttnctccnnca

SEQ ID NO: 155 - DNA, 1182 bp, Homo Sapiens
  misc_feature (1)..(1): n is a, c, g, or t
  misc_feature (819)..(819): n is a, c, g, or t
  misc_feature (878)..(878): n is a, c, g, or t
  misc_feature (880)..(880): n is a, c, g, or t
  misc_feature (908)..(908): n is a, c, g, or t
  misc_feature (930)..(930): n is a, c, g, or t
  misc_feature (952)..(952): n is a, c, g, or t
  misc_feature (954)..(954): n is a, c, g, or t
  misc_feature (964)..(964): n is a, c, g, or t
  misc_feature (1030)..(1030): n is a, c, g, or t
  misc_feature (1032)..(1032): n is a, c, g, or t
  misc_feature (1050)..(1050): n is a, c, g, or t
  misc_feature (1059)..(1059): n is a, c, g, or t
  misc_feature (1072)..(1072): n is a, c, g, or t
  misc_feature (1081)..(1081): n is a, c, g, or t
  misc_feature (1088)..(1088): n is a, c, g, or t
  misc_feature (1092)..(1092): n is a, c, g, or t
  misc_feature (1094)..(1094): n is a, c, g, or t
  misc_feature (1099)..(1099): n is a, c, g, or t
  misc_feature (1106)..(1107): n is a, c, g, or t
  misc_feature (1119)..(1119): n is a, c, g, or t
  misc_feature (1122)..(1123): n is a, c, g, or t
  misc_feature (1125)..(1126): n is a, c, g, or t
  misc_feature (1128)..(1128): n is a, c, g, or t
  misc_feature (1133)..(1133): n is a, c, g, or t
  misc_feature (1138)..(1138): n is a, c, g, or t
  misc_feature (1143)..(1143): n is a, c, g, or t
  misc_feature (1149)..(1149): n is a, c, g, or t
  misc_feature (1157)..(1157): n is a, c, g, or t
  misc_feature (1161)..(1161): n is a, c, g, or t
  misc_feature (1163)..(1163): n is a, c, g, or t
  misc_feature (1170)..(1170): n is a, c, g, or t
  misc_feature (1175)..(1175): n is a, c, g, or t
naatagagaaattactatgagaggatcgcatcaccatcaccatcacggatcctatttaggtgacactatagaatcgtcgacccacgcgtccgcccacgcgtccggcactttccgcatctatggggagactcccgaggcttgccgacaggcccgaagctaccttgagttttctgaggactcagtgcaagtgcccaggaacctggttggcaaagtgattggaaagaacgggaaagtgatccaggagattgtggataaatctggtgtggtgagggttcgagtggaaggtgataatgacaagaagaaccccagggaggagggaatggttcccttcatttttgttggcacccgagagaacatcagcaatgcccaggctttgctggagtatcacctctcctacctgcaggaggtagagcagcttcgcttggagaggctacaaattgatgagcagcttcggcagattgggctgggctttcgccctcctgggagtgggcggggcagcggtggcagcgacaaggctggatatagcactgatgagagctcctcctcctccctccatgcgactcgaacctatgggggcagctatgggggccgtggccgtggccggaggacaggcggtcctgcctatggccccagctcagatgtgtctacagcttcagagactgagtcagagaagagagaggagcccaaccgagctgggcctggcgacagggatcccccaacccgaggggaagaaagccggaggcggccgactgggggccggggtaggggacccccacctgccccccggcccacttcgagatacaattcttcatctattanctcagtgctgaaggatccagacagtaatccctacagcctattggacacgtctgaaccanancccccggttgattcaaaacctggggaanccccccccagcaagtgccaggngccgccgctccgccgccgccgnantgatgaaaanaggaccgtcatggatggaggcctggaatcaaatggcccaacatgacaaaaaatggcctggaaaatnantcaaaaacctcaacgtcntaatcccanccccccccccccnaaccggggnaatccgnacgnanggccnttatcannggaaaccccccnccnngnncnccaantcggnacccnaaaatnctttcccnaaantnaaaaaangggangcccccc

SEQ ID NO: 156 - DNA, 581 bp, Homo Sapiens
atgagaggatcgcatcaccatcaccatcacggatcctatttaggtgacactatagaatcgtcgacccacgcgtccgacaaccccagcaagcccctgcacgtcatcaagggtcacagtaaatcgatccagtgtctgacggtgcataaaaacggcggcaagtcctacatttactctgggagccacgacggacacattaattactgggattcagagacgggggagaacgactccttcgctgggaaaggccacacgaaccaggtgtccaggatgaccgttgatgagtcggggcagctcatcagctgcagcatggacgacaccgtgcggtacaccaacctcatgctgcgggactacagcggacaaggagttgtgaaactggacgttcagccaaagtgcgtagccgtcggccccgggggatacgccgtggtcgtgtgcattggacagattgtcctgctgaaggatcagaggaagtgcttcagcatcgacaaccccggctacaagcccgaagttgtggcagcgcaccccggcggggacacggtggcaattgggggtgtggacggcaacgtccgcctgtattccatcct

SEQ ID NO: 157 - DNA, 1109 bp, Homo Sapiens
  misc_feature (835)..(835): n is a, c, g, or t
  misc_feature (858)..(858): n is a, c, g, or t
  misc_feature (902)..(902): n is a, c, g, or t
  misc_feature (917)..(917): n is a, c, g, or t
  misc_feature (950)..(950): n is a, c, g, or t
  misc_feature (966)..(966): n is a, c, g, or t
  misc_feature (979)..(979): n is a, c, g, or t
  misc_feature (986)..(986): n is a, c, g, or t
  misc_feature (1003)..(1003): n is a, c, g, or t
  misc_feature (1013)..(1013): n is a, c, g, or t
  misc_feature (1018)..(1018): n is a, c, g, or t
  misc_feature (1023)..(1023): n is a, c, g, or t
  misc_feature (1031)..(1031): n is a, c, g, or t
  misc_feature (1042)..(1042): n is a, c, g, or t
  misc_feature (1050)..(1050): n is a, c, g, or t
  misc_feature (1071)..(1071): n is a, c, g, or t
  misc_feature (1084)..(1084): n is a, c, g, or t
  misc_feature (1102)..(1102): n is a, c, g, or t
agagaaattactatgagaggatcgcatcaccatcaccatcacggatcctatttaggtgacactatagaatcgtcgacccacgcgtccgctgcactgaactctgggtggaaaaccatctatcaggtggacctcccccacacggcgatccaggaagcctccaacaagaagaaattcgaggatgccttgagcctcatccacagcgcctggcagcggagcgacagtctctgccgcggccgagcctcccgagacccctggtgctgaggcagagctggttggcgtccctggtgggcaggaaaggaaggcacgccagccggcaggcacactgtcacggctgttgtcatgctgtcgggagcctacagtccacccctgccctgggcggcagaaccaccgagtgtggcttaagacagggtccctccactccagggatccagatcaggtgcccggcacccctgggcatcctgcccgacaggtagcgaatggaggtcgctgggggcagagggtccgagccctgtgggctctgcggatccacgccctcctcccgggcctccgcctcagtctgcagaatttctgccgagtggcaccgagaacaccatccatctaaggacgaacaaaagaaccaggagggcgggacccccctcttcctctcctgggttgggggctggggccctgagtgcccagccatccttgttcgtgtttgaacactctcctggccacgtggggaagcgggaacacggggtgtctgcgcatgtttcctcctcctagctccatcactgcgcacacagctgcctgcctcgccagatgcaggggggcgggcagccctcccctggctgccagnaggctctgcatgcccacagtccntgccctgcctgtcccctcaacccggcagtgcctgtaacaccgangaacaaagggggtgnatggggggcttggaaaaaggcggaacccaccancctggcatccatgttnaaaatcttttaantgtcccntgcttggctggaaccangccctttccntaaanttttnttcaaaancctccttgggnaaagggtnaaggggggtttggggtttttntttttttaaaaanaaaaaaaaaattgttttnttttgcc

SEQ ID NO: 158 - DNA, 1098 bp, Homo Sapiens
  misc_feature (1)..(1): n is a, c, g, or t
  misc_feature (5)..(5): n is a, c, g, or t
  misc_feature (884)..(884): n is a, c, g, or t
  misc_feature (970)..(970): n is a, c, g, or t
  misc_feature (972)..(972): n is a, c, g, or t
  misc_feature (1001)..(1001): n is a, c, g, or t
  misc_feature (1013)..(1013): n is a, c, g, or t
  misc_feature (1017)..(1017): n is a, c, g, or t
  misc_feature (1027)..(1027): n is a, c, g, or t
  misc_feature (1042)..(1042): n is a, c, g, or t
  misc_feature (1046)..(1046): n is a, c, g, or t
  misc_feature (1054)..(1054): n is a, c, g, or t
  misc_feature (1061)..(1061): n is a, c, g, or t
  misc_feature (1064)..(1064): n is a, c, g, or t
  misc_feature (1070)..(1070): n is a, c, g, or t
  misc_feature (1078)..(1078): n is a, c, g, or t
  misc_feature (1097)..(1098): n is a, c, g, or t
naaanagagaaattactatggagaggatcgcatcaccatcaccatcacggatcctatttaggtgacactatagaatcgtcgacccacgcgtccgcccacgcgtccgcccacgcgtccggcaactttgacctcaaggtcctaaatgcccagaaggctggatatggtgccgctgtagtacacaatgtgaattccaatgaacttctgaacatggtgtggaatagtgaggaaatccagcagcagatctggatcccgtctgtatttattggggagagaagctccgagtacctgcgtgccctctttgtctacgagaagggggctcgggtgcttctggttccagacaataccttccccttgggctattacctcatccctttcacagggattgtgggactgctggttttggccatgggagcagtaatgatagctcgttgtatccagcaccggaaacggctccagcggaatcgacttaccaaagagcaactgaaacagattcctacacatgactatcagaagggagaccagtatgatgtctgtgccatttgcctggatgaatatgaggatggggacaagctgcgggtactcccctgtgctcatgcctaccacagccgctgcgtggacccctggctcactcagacccggaagacctgccccatttgcaagcagcctgttcatcggggtcctggggacgaagaccaagaggaagaaactcaagggcaagaggagggtgatgaaggggagccaagggaccaccctgcctcagaaaggaccccacttttgggttctagccccactcttcccacctcctttggttccttagccccagctccccttgtttttcctgggccttcaacagatcccccactgtcccctccctcttcccctgntatcctggtctaataaccccccacacatacacctctggtgacctatttgcacagaccgtcgtcttccctccagtcttctgaggganangggacattccatcccaagcttctccttanccacacctatcntttngaggggcttnggggtggggctgggncaancaaaggantgggtcntcncttctngggctaanaaaattgtttctttgggann

SEQ ID NO: 159 - DNA, 1349 bp, Homo Sapiens
  misc_feature (928)..(928): n is a, c, g, or t
  misc_feature (977)..(978): n is a, c, g, or t
  misc_feature (982)..(982): n is a, c, g, or t
  misc_feature (985)..(985): n is a, c, g, or t
  misc_feature (1014)..(1014): n is a, c, g, or t
  misc_feature (1018)..(1018): n is a, c, g, or t
  misc_feature (1057)..(1057): n is a, c, g, or t
  misc_feature (1068)..(1068): n is a, c, g, or t
  misc_feature (1081)..(1081): n is a, c, g, or t
  misc_feature (1119)..(1119): n is a, c, g, or t
  misc_feature (1124)..(1124): n is a, c, g, or t
  misc_feature (1138)..(1138): n is a, c, g, or t
  misc_feature (1143)..(1143): n is a, c, g, or t
  misc_feature (1146)..(1146): n is a, c, g, or t
  misc_feature (1148)..(1148): n is a, c, g, or t
  misc_feature (1152)..(1152): n is a, c, g, or t
  misc_feature (1156)..(1156): n is a, c, g, or t
  misc_feature (1172)..(1172): n is a, c, g, or t
  misc_feature (1174)..(1174): n is a, c, g, or t
  misc_feature (1191)..(1191): n is a, c, g, or t
  misc_feature (1193)..(1193): n is a, c, g, or t
  misc_feature (1198)..(1198): n is a, c, g, or t
  misc_feature (1207)..(1207): n is a, c, g, or t
  misc_feature (1213)..(1213): n is a, c, g, or t
  misc_feature (1215)..(1215): n is a, c, g, or t
  misc_feature (1219)..(1219): n is a, c, g, or t
  misc_feature (1223)..(1223): n is a, c, g, or t
  misc_feature (1231)..(1231): n is a, c, g, or t
  misc_feature (1234)..(1234): n is a, c, g, or t
  misc_feature (1250)..(1250): n is a, c, g, or t
  misc_feature (1271)..(1271): n is a, c, g, or t
  misc_feature (1277)..(1278): n is a, c, g, or t
  misc_feature (1280)..(1280): n is a, c, g, or t
  misc_feature (1289)..(1289): n is a, c, g, or t
  misc_feature (1292)..(1292): n is a, c, g, or t
  misc_feature (1313)..(1313): n is a, c, g, or t
  misc_feature (1316)..(1316): n is a, c, g, or t
  misc_feature (1321)..(1321): n is a, c, g, or t
  misc_feature (1325)..(1325): n is a, c, g, or t
  misc_feature (1328)..(1328): n is a, c, g, or t
  misc_feature (1335)..(1335): n is a, c, g, or t
  misc_feature (1337)..(1337): n is a, c, g, or t
  misc_feature (1346)..(1346): n is a, c, g, or t
  misc_feature (1349)..(1349): n is a, c, g, or t
attagagaaattactatgagaggatcgcatcaccatcaccatcacggatcctatttaggtgacactatagaatcgtcgacccacgcgtccggtcgagaccgaagccaggggagtccgaggtggacctgctgcacttccagagtcagtttctcgcagctggtgcagccccagcagtgcagttggtgaagaaaggaaataggggcggtggtgatgccaactcagaccggcctccgctccaggaccatcgggatgtggtgatgttggacaatctcccagatttgcccccagctttggtcccttctcctccaaagagagccaggcccagccctggccactgcctgcctgaggatgaggacccagaagagaggctgaggaggcatgatcagcacatcactgctgtcttgactaagattattgaacgagatacaagttcagtggccgtgaatctgcctgtgcccagtggtgttgctttccctgctgtgttccttcgctcgcgggacacacaggggaaatcagcaacatctggtaagagaagcatctttgcccaggaaattgcggcaaggaggatagctgaagccaagggcccatcagttggggaagttgtgcccaacgtgggcccaccagagggtgccgtgacctgtgagacacccactcctaggaaccagggctgccagcttcctgggagcagccacagctttcagggacccaatctggtcacagggaaggggctcagggatcaagaagctgagcaggaagcccagactatccatgaagagaacatagcaagactgcaggccatggctcctgaggagatcctgcaggaacagcagcggttgctggcccagcttgaccccagcttggttgctttcttgagatctcacagccacacgcaagagcaaacaggagagacagcctctgaggagcagangccaggaggaccctctgctaatgtcaccaaggagaacccctcatgtcanntttngcnagtgagcccagaaaaaaaaaaagctgganccanaaccccagctctggcattgcccgtgacccctcaaaaaanggctgccatgnacctgtcaactgnaaaactccctggacccagaattgcccctgtccggggcncaaancaggaaaagatgcngctcnatntntctnaggnaaatatggccctgagngnactgccccccctgggtntnccccntggaaaaancaaaangngggnttcntaaggagnttncctgacccccccgttncccaaaaaatggcttttgttncccctnncnaggcccccnggnttggaaaaaaaagggggtaanccnttggnggtnccnccccccncnaaaaaaggnatn

SEQ ID NO: 160 - DNA, 1039 bp, Homo Sapiens
  misc_feature (599)..(599): n is a, c, g, or t
  misc_feature (735)..(735): n is a, c, g, or t
  misc_feature (767)..(768): n is a, c, g, or t
  misc_feature (771)..(771): n is a, c, g, or t
  misc_feature (790)..(791): n is a, c, g, or t
  misc_feature (795)..(795): n is a, c, g, or t
  misc_feature (798)..(798): n is a, c, g, or t
  misc_feature (801)..(801): n is a, c, g, or t
  misc_feature (808)..(808): n is a, c, g, or t
  misc_feature (815)..(815): n is a, c, g, or t
  misc_feature (847)..(847): n is a, c, g, or t
  misc_feature (852)..(852): n is a, c, g, or t
  misc_feature (859)..(860): n is a, c, g, or t
  misc_feature (874)..(874): n is a, c, g, or t
  misc_feature (886)..(886): n is a, c, g, or t
  misc_feature (905)..(905): n is a, c, g, or t
  misc_feature (919)..(919): n is a, c, g, or t
  misc_feature (929)..(929): n is a, c, g, or t
  misc_feature (933)..(933): n is a, c, g, or t
  misc_feature (935)..(935): n is a, c, g, or t
  misc_feature (944)..(944): n is a, c, g, or t
  misc_feature (954)..(954): n is a, c, g, or t
  misc_feature (975)..(975): n is a, c, g, or t
  misc_feature (979)..(980): n is a, c, g, or t
  misc_feature (985)..(985): n is a, c, g, or t
  misc_feature (994)..(994): n is a, c, g, or t
  misc_feature (997)..(997): n is a, c, g, or t
  misc_feature (1000)..(1001): n is a, c, g, or t
  misc_feature (1003)..(1003): n is a, c, g, or t
  misc_feature (1036)..(1036): n is a, c, g, or t
tagagagaattactatgagaggatcgcatcaccatcaccatcacggatcctatttaggtgacactatagaatcgtcgacccacgcgtccgcgacggcccgcgccccttcccgctcggccgcctggtgccctcggcagtgtcctgcggcctctgcgagcccggcctggctgccgcccccgccgcccccaccctgctgcccgctgcctacctctgcgcccccaccgccccacccgccgtcaccgccgccctggggggttcccgctggcctgggggtccccgcagccggccccgaggcccgcgcccggacggtcctcagccctcgctctcgctggcggagcagcacctggagtcgcccgtgcccagcgccccgggggctctggcgggcggtcccacccaggcggccccgggagtccgcggggaggaggaacagtgggcccgggagatcggggcccagctgcggcggatggcggacgacctcaacgcacagtacgagcggcggagacaagaggagcagcagcggcaccgcccctcaccctggagggtcctgtacaatctcatcatgggactcctgcccttacccaggggccacagagcccccnagatggagcccaattaggtgcctgcacccgcccggtggacgtcagggactcggggggcaggcccctcccacctcctgacaccctggccagcgcgggggaactttctctgcaccatgtaacataatgggactcccanccctgcctgtcccggggggcgggccggggcanncanttccaagccccaacccaannctgnggntgnaattganggaaatncggaacttcttgggttcctttggccaaaaaanccaangaaaaanngaaggcttaatggnactcaacattcngaaagttggctgttaaccnaaaaggggttgggnaactgaaacnaccngnctttgaccntacaacaaanaatttaaaaaaaaggtttatnttgnntggtncccctttcnaanctnnangggttaaattggggggggggggggggattttcnttt

SEQ ID NO: 161 - DNA, 797 bp, Homo Sapiens
  misc_feature (3)..(3): n is a, c, g, or t
  misc_feature (51)..(51): n is a, c, g, or t
  misc_feature (763)..(764): n is a, c, g, or t
  misc_feature (766)..(766): n is a, c, g, or t
  misc_feature (777)..(778): n is a, c, g, or t
  misc_feature (780)..(782): n is a, c, g, or t
  misc_feature (784)..(784): n is a, c, g, or t
  misc_feature (787)..(788): n is a, c, g, or t
  misc_feature (790)..(790): n is a, c, g, or t
  misc_feature (793)..(793): n is a, c, g, or t
  misc_feature (797)..(797): n is a, c, g, or t
aanaaaagagaaattactatgagaggatcgcatcaccatcaccatcacggnatcctatttaggtgacactatagaatcgtcgacccacgcgtccgggaggaggtgttgcccatggcccccggggccccacaagttactactacatgctgcccatgaaggtgcgggcgctgggtctcaaagtggcactgaccgtcaagctggcccaggacgacctgcacatcatggactccctagagctgcccaccggagacccacagtacctgacagagctggcgcactaccgccgctggggggactccgtactcctcgtggacttaacacacgaggagatgccacagagcatcgtggaggccacctctaggcttaagaccttcaacttgatcccggctgttggcctaaatgtgcacagcatgctcaagcaccagacgctggtcctgacgctgcccaccgtcgccttcctggaggacaagctgctctggcaggactcacgttacagacccctctaccccgtaccactgttgatgtgaagcacctcttctgagccaggccgagcccctggccgacttgggagcctcaggcccacgcccacccttcgaggaaggtgtcacctggaccccttcattccacggaggaagctgaggccacagggagcggccatcgccattgggaaggggcgactccacggaaagcccagacgggcttctgcatccattccctctttttgtttttaaaataaattgtatttttgaatcaaggaggatanntnaaaaaaaaaanntnnntnatnnanaanattn

SEQ ID NO: 162 - DNA, 1234 bp, Homo Sapiens
  misc_feature (1)..(1): n is a, c, g, or t
  misc_feature (916)..(916): n is a, c, g, or t
  misc_feature (939)..(939): n is a, c, g, or t
  misc_feature (945)..(945): n is a, c, g, or t
  misc_feature (950)..(950): n is a, c, g, or t
  misc_feature (973)..(973): n is a, c, g, or t
  misc_feature (976)..(976): n is a, c, g, or t
  misc_feature (1018)..(1018): n is a, c, g, or t
  misc_feature (1023)..(1023): n is a, c, g, or t
  misc_feature (1035)..(1035): n is a, c, g, or t
  misc_feature (1043)..(1043): n is a, c, g, or t
  misc_feature (1049)..(1049): n is a, c, g, or t
  misc_feature (1053)..(1053): n is a, c, g, or t
  misc_feature (1057)..(1057): n is a, c, g, or t
  misc_feature (1061)..(1061): n is a, c, g, or t
  misc_feature (1067)..(1067): n is a, c, g, or t
  misc_feature (1071)..(1072): n is a, c, g, or t
  misc_feature (1079)..(1079): n is a, c, g, or t
  misc_feature (1085)..(1085): n is a, c, g, or t
  misc_feature (1096)..(1096): n is a, c, g, or t
  misc_feature (1102)..(1103): n is a, c, g, or t
  misc_feature (1115)..(1115): n is a, c, g, or t
  misc_feature (1122)..(1122): n is a, c, g, or t
  misc_feature (1126)..(1126): n is a, c, g, or t
  misc_feature (1128)..(1128): n is a, c, g, or t
  misc_feature (1132)..(1132): n is a, c, g, or t
  misc_feature (1140)..(1140): n is a, c, g, or t
  misc_feature (1146)..(1146): n is a, c, g, or t
  misc_feature (1149)..(1149): n is a, c, g, or t
  misc_feature (1158)..(1158): n is a, c, g, or t
  misc_feature (1160)..(1160): n is a, c, g, or t
  misc_feature (1176)..(1177): n is a, c, g, or t
  misc_feature (1179)..(1180): n is a, c, g, or t
  misc_feature (1183)..(1183): n is a, c, g, or t
  misc_feature (1199)..(1199): n is a, c, g, or t
  misc_feature (1201)..(1201): n is a, c, g, or t
  misc_feature (1206)..(1206): n is a, c, g, or t
  misc_feature (1214)..(1214): n is a, c, g, or t
  misc_feature (1217)..(1217): n is a, c, g, or t
naatagagaaattactatgagaggatcgcatcaccatcaccatcacggatcctatttaggtgacactatagaatcgtcgacccacgcgtccgggactacgcggcagcggctcttcaaagcggagccgggagtttttgctacagttttcgccaccatgagtcgcagctataatgatgagctgcagttcttggagaagatcaataaaaactgctggaggatcaagaagggcttcgtgcccaacatgcaggttgaaggtgttttctatgtgaatgatgctctggagaaattgatgtttgaggaattaaggaatgcctgtcgaggtggtggtgttggtggcttcctgccagccatgaaacagattggcaatgtggcagccctgcctggaattgttcatcgatctattgggcttcctgatgtccattcaggatatgggtttgctattgggaacatggcagcctttgatatgaatgaccctgaagcagtagtatccccaggtggtgtcgggtttgacatcaactgtggtgtccgcttgctaagaaccaatttagatgaaagtgatgtccagcctgtgaaggagcaacttgcccaagctatgtttgaccacattcctgttggggtggggtcaaaaggtgtcatcccaatgaatgccaaagacttggaggaggccttggagatgggggtggactggtccttaagagaagggtatgcctgggctgaagacaaggagcactgcgaggagtacggaaggatgctgcaggctgaccccaataaagtttctgcaagggcgaagaaaagaggccttcctcagttggggaccctgggagcaggcaaccattatgcagaaatccaggttgtggatgagatttttcaatgagtatgctgctaaaaaaaatgggccatcccaccataaaggaanaggtgtgggtgatgaatccacantggaancaaanggcttggggccaccaagtaaccncanatgcccctggtaacctatggaaaaaggccatgaaaaaaaaanaaaantaaaatccatgnatcggcanttggcnttgngccncaancccttncccnnaaagggncaaaanaaccttaaggnaatggnncctgctggaaanaatgccngggncnaccncttctccnagaacnttntaaacccgncnggttttccccaaggtnntnnaancaaccccggaaaatgnanccaangggacaanaangttccccaacattgcca

SEQ ID NO: 163 - DNA, 1149 bp, Homo Sapiens
  misc_feature (10)..(10): n is a, c, g, or t
  misc_feature (838)..(838): n is a, c, g, or t
  misc_feature (863)..(863): n is a, c, g, or t
  misc_feature (893)..(894): n is a, c, g, or t
  misc_feature (896)..(896): n is a, c, g, or t
  misc_feature (898)..(898): n is a, c, g, or t
  misc_feature (918)..(918): n is a, c, g, or t
  misc_feature (921)..(921): n is a, c, g, or t
  misc_feature (945)..(945): n is a, c, g, or t
  misc_feature (961)..(961): n is a, c, g, or t
  misc_feature (970)..(970): n is a, c, g, or t
  misc_feature (973)..(973): n is a, c, g, or t
  misc_feature (993)..(993): n is a, c, g, or t
  misc_feature (1007)..(1007): n is a, c, g, or t
  misc_feature (1012)..(1012): n is a, c, g, or t
  misc_feature (1021)..(1021): n is a, c, g, or t
  misc_feature (1053)..(1053): n is a, c, g, or t
  misc_feature (1074)..(1074): n is a, c, g, or t
  misc_feature (1078)..(1078): n is a, c, g, or t
  misc_feature (1086)..(1086): n is a, c, g, or t
  misc_feature (1099)..(1099): n is a, c, g, or t
  misc_feature (1104)..(1104): n is a, c, g, or t
  misc_feature (1106)..(1106): n is a, c, g, or t
  misc_feature (1121)..(1121): n is a, c, g, or t
  misc_feature (1123)..(1123): n is a, c, g, or t
  misc_feature (1125)..(1125): n is a, c, g, or t
  misc_feature (1127)..(1127): n is a, c, g, or t
  misc_feature (1130)..(1130): n is a, c, g, or t
  misc_feature (1132)..(1133): n is a, c, g, or t
  misc_feature (1136)..(1137): n is a, c, g, or t
  misc_feature (1139)..(1139): n is a, c, g, or t
  misc_feature (1146)..(1146): n is a, c, g, or t
aatagagganaattaactatgagaggatcgcatcaccatcaccattcacggatcctatttaggtgacactatagaatcgtcgacccacgcgtccgcccacgcgtccgtgcctacctcgagcccgctctcctcctgccagctgccgggctatcaagccaggcctctctcaccctgtccctctctgccacatcgtacctgctcaggccgccacctctttccttttctcccgcactgaggaagttccctaccacgtctgggggggctctgctgtgtaccgagaatgggatcttcacttccgctcttcattccaagattaaaggaaattgaaatgcggaataagagtttgccactagcatccagcatttagggaaaaatctctccttataaaaaccagaaaagctggaggagaagctttgcccattatgcctcaagttaccacgtggttttgtttgtttgtttggatctggcgcttgacggttttctggtacagcccccaggacgtgctgctgaggacacaggtgcgcatccctggtgagaggacctatgcccctgccctggacctggtgtggaacgcggcccagggtgggactgccggctccctgaggcagagagttgccgatttctatcgtcttcccgtggagaagattgaaattgccaaatactttcccgaaaagttcgagtggcttccgatatctagctggaaccaacaaataaccaagaggaaaaagaaaaaaaaacaagattatttgcaaggggcaccgtattacttgaaagacggagatactattggtgttaagaatctcctgattgacgacgatgatgatttcagtacaatcanagatgacactggaaaagaaaagcanaaacaacgggccctgggggagaaggaaaanncnanaaacccctccatgaacaaancanctacatcctctccagtgcaaaaancctgcccggccccaancccggaaanttntctctccatccacgtggggncttcaaaaaaccgngccgntgcagggtntactccgaaaaaatctccggtgaagccaaaangtgggttcctgggcatgggantggntgcctggncccccaatccaanccctngnttctttgaaaaaggnangntnctngnngcnngncagggangaa

SEQ ID NO: 164 - DNA, 1295 bp, Homo Sapiens
  misc_feature (887)..(887): n is a, c, g, or t
  misc_feature (892)..(892): n is a, c, g, or t
  misc_feature (898)..(898): n is a, c, g, or t
  misc_feature (901)..(901): n is a, c, g, or t
  misc_feature (906)..(906): n is a, c, g, or t
  misc_feature (910)..(910): n is a, c, g, or t
  misc_feature (913)..(913): n is a, c, g, or t
  misc_feature (919)..(919): n is a, c, g, or t
  misc_feature (1023)..(1023): n is a, c, g, or t
  misc_feature (1034)..(1034): n is a, c, g, or t
  misc_feature (1049)..(1049): n is a, c, g, or t
  misc_feature (1072)..(1072): n is a, c, g, or t
  misc_feature (1074)..(1074): n is a, c, g, or t
  misc_feature (1085)..(1085): n is a, c, g, or t
  misc_feature (1099)..(1099): n is a, c, g, or t
  misc_feature (1102)..(1102): n is a, c, g, or t
  misc_feature (1117)..(1117): n is a, c, g, or t
  misc_feature (1125)..(1125): n is a, c, g, or t
  misc_feature (1127)..(1127): n is a, c, g, or t
  misc_feature (1141)..(1141): n is a, c, g, or t
  misc_feature (1145)..(1145): n is a, c, g, or t
  misc_feature (1148)..(1148): n is a, c, g, or t
  misc_feature (1152)..(1152): n is a, c, g, or t
  misc_feature (1156)..(1156): n is a, c, g, or t
  misc_feature (1168)..(1168): n is a, c, g, or t
  misc_feature (1171)..(1172): n is a, c, g, or t
  misc_feature (1189)..(1189): n is a, c, g, or t
  misc_feature (1195)..(1195): n is a, c, g, or t
  misc_feature (1199)..(1199): n is a, c, g, or t
  misc_feature (1202)..(1203): n is a, c, g, or t
  misc_feature (1207)..(1207): n is a, c, g, or t
  misc_feature (1209)..(1209): n is a, c, g, or t
  misc_feature (1215)..(1215): n is a, c, g, or t
  misc_feature (1234)..(1234): n is a, c, g, or t
  misc_feature (1241)..(1241): n is a, c, g, or t
  misc_feature (1256)..(1256): n is a, c, g, or t
  misc_feature (1262)..(1262): n is a, c, g, or t
  misc_feature (1268)..(1268): n is a, c, g, or t
  misc_feature (1289)..(1289): n is a, c, g, or t
tagagaaattactatgagaggatcgcatcaccatcaccatcacggatcctatttaggtgacactatagaatcgtcgacccacgcgtccgcgtctctgctactggactgtggtgagggcacatttgggcagctgtgccgtcattacggagaccaggtggacagggtcctgggcaccctggctgctgtgtttgtgtcccacctgcacgcagatcaccacacgggcttgccaagtatcttgctgcagagagaacgcgccttggcatctttgggaaagccgcttcaccctttgctggtggttgcccccaaccagctcaaagcctggctccagcagtaccacaaccagtgccaggaggtcctgcaccacatcagtatgattcctgccaaatgccttcaggaaggggctgagatctccagtcctgcagtggaaagattgatcagttcgctgttgcgaacatgtgatttggaagagtttcagacctgtctggtgcggcactgcaagcatgcgtttggctgtgcgctggtgcacacctctggctggaaagtggtctattccggggacaccatgccctgcgaggctctggtccggatggggaaagatgccaccctcctgatacatgaagccaccctggaagatggtttggaagaggaagcagtggaaaagacacacagcacaacgtcccaagccatcagcgtggggatgcggatgaacgcggagttcattatgctgaaccacttcagccagcgctatgccaaggtccccctcttcagccccaacttcagcgagaaagtgggagttgcctttgaccacatgaaggtctgctttggagactttccaacaatgcccaagctgattcccccactgaaagccctgtttgctggcgacatcnagganatggangancgcangganaancggganctgcggcaggtgcgggcggccctcctgtccagggaactggcaggcggcctggaagatgggaacctcaacaaaaccgggccccacaaagaaccccaggccaaaangtcaaacccantgaaaatctggaaancctgaactcaaaaggtgggtgtntntgcccagcagnaccgtattgcctcntgntggaaaactaaaaanaggccccnanagcacccagaaagngtangancttnccancttgggtccaanaannaaactaaaagcccttanaagggncggnaanngggncnaaagtnccccgaaaaaaaaaaaaanttttttngggttttaaaacttnaaaaangggccnttcctaaaaaaattccccccnaaaaaa

SEQ ID NO: 165 - DNA, 1292 bp, Homo Sapiens
  misc_feature (1)..(1): n is a, c, g, or t
  misc_feature (920)..(920): n is a, c, g, or t
  misc_feature (942)..(942): n is a, c, g, or t
  misc_feature (956)..(956): n is a, c, g, or t
  misc_feature (958)..(958): n is a, c, g, or t
  misc_feature (989)..(989): n is a, c, g, or t
  misc_feature (1026)..(1026): n is a, c, g, or t
  misc_feature (1037)..(1038): n is a, c, g, or t
  misc_feature (1057)..(1057): n is a, c, g, or t
  misc_feature (1061)..(1061): n is a, c, g, or t
  misc_feature (1071)..(1071): n is a, c, g, or t
  misc_feature (1097)..(1097): n is a, c, g, or t
  misc_feature (1106)..(1106): n is a, c, g, or t
  misc_feature (1110)..(1110): n is a, c, g, or t
  misc_feature (1113)..(1113): n is a, c, g, or t
  misc_feature (1117)..(1117): n is a, c, g, or t
  misc_feature (1119)..(1119): n is a, c, g, or t
  misc_feature (1125)..(1125): n is a, c, g, or t
  misc_feature (1134)..(1135): n is a, c, g, or t
  misc_feature (1149)..(1149): n is a, c, g, or t
  misc_feature (1155)..(1156): n is a, c, g, or t
  misc_feature (1159)..(1159): n is a, c, g, or t
  misc_feature (1169)..(1169): n is a, c, g, or t
  misc_feature (1173)..(1173): n is a, c, g, or t
  misc_feature (1177)..(1177): n is a, c, g, or t
  misc_feature (1182)..(1182): n is a, c, g, or t
  misc_feature (1200)..(1200): n is a, c, g, or t
  misc_feature (1205)..(1206): n is a, c, g, or t
  misc_feature (1208)..(1208): n is a, c, g, or t
  misc_feature (1226)..(1226): n is a, c, g, or t
  misc_feature (1249)..(1250): n is a, c, g, or t
  misc_feature (1254)..(1254): n is a, c, g, or t
  misc_feature (1261)..(1261): n is a, c, g, or t
  misc_feature (1265)..(1265): n is a, c, g, or t
  misc_feature (1271)..(1271): n is a, c, g, or t
  misc_feature (1281)..(1283): n is a, c, g, or t
  misc_feature (1290)..(1291): n is a, c, g, or t
naatagagaaattactatgagaggatcgcatcaccatcaccatcacggatcctatttaggtgacactatagaatcgtcgacccacgcgtccgcgctggtggagcacgcagctgacgaagctcgggacaggatcaaccggttcctcccaggcggcaagatgggctatctgaagaggaacggggacgggagcctgctctacagcgtggtcaacacggccgagccggacgctgatgaggaggagacccacccggtggacttgagctcgctctccagtaagctactcccaggcttcaccacgctgggcttcaaagacgagagaagaaacaaagtcacctttctctccagtgccactactgcgctttcgatgcagaataattcagtatttggcgacttgaagtcggacgagatggagctgctctactcagcctacggagatgagacaggcgtgcagtgtgcgctgagcctgcaggagtttgtgaaggatgctgggagctacagcaagaaagtggtggacgacctcctggaccagatcacaggcggagaccactctaggacgctcttccagctgaagcagagaagaaatgttcccatgaagcctccagatgaagccaaggttggggacaccctaggagacagcagcagctctgttctggagttcatgtcgatgaagtcctatcccgacgtttctgtggatatctccatgctcagctctctggggaaggtgaagaaggagctggaccctgacgacagccatttgaacttggatgagacgacgaagctcctgcaggacctgcacgaagcacaggcggagcgcggcggctctcggccgtcgtccaacctcagctccctgtccaacgcctccgagagggaccagcaccacctgggaagcccttctcgcctgagtgtcggggagcagccanacgtcacccacgaccctatgantttcttcagtctcnanagcctgcggcctctgccaaaactaactctanaccaccttcagctctttaattaattttttaagtttantttgcccgggnnaaagtttttgtcatcaaanaagnactttgatcntgtccccttttgcatgcgggaaacancccccgggnaagnaangaantntctggnggatctgtnnacaaaattcccaancccccnnaancctgaggatnggantctnacccnaaagccatatggccctcntgttnncnaaaaaaattttttaaacnccccccggaaccctgggaagggnntccnacccaangggngggggnccctttttcnnnaaaaaannt

SEQ ID NO: 166 - DNA, 932 bp, Homo Sapiens
  misc_feature (899)..(899): n is a, c, g, or t
  misc_feature (907)..(907): n is a, c, g, or t
  misc_feature (911)..(914): n is a, c, g, or t
  misc_feature (916)..(932): n is a, c, g, or t
gagaaaattactatgagaggatcgcatcaccatcaccatcacggatcctatttaggtgacactatagaatcgtcgacccacgcgtccggggcggagggcggagggaacttgcaccgaagcatcactcgagaccccaaacctccaggcctgaggcccagccagcgcccaatggatgacaaaaagaagaaacggagtcccaagccctgcctggcccagccagcccaggccccaggcacactacggagggtccctgtgcctaccagccacagcggctccttggccctaggacttcctcatctgccatcccccaagcagcgggccaagttcaagagagtaggcaaagagaagtgccgcccagtcctggctggaggtggaagcggctctgcaggcacgcccctgcagcactccttcctgaccgaggtgactgatgtctatgagatggaggggggactcctgaacctgctcaatgatttccactctggccggctgcaggccttcgggaaggaatgctcctttgagcagctggagcacgttcgggagatgcaggagaagctagcccggctgcacttcagcctggatgtgtgtggggaggaggaggacgatgaagaggaagaggatggggtcactgaggggctgccagaggagcagaagaagacaatggctgaccgtaacctggaccagctgcttagcaatctggaagacctcagtaattctatccagaagctgcacctggccgagaacgccgagcctgaggagcagtccgctgcgtaggcgtcccacgcaggcccacactgcccctctcattctcttcaaactgtgactttttacagactcgggcgggtgttctgcggccccccaggtgctatgggggaaggggggcgttgaatggaattaaaccngaaagaangccnnnnannnnnnnnnnnnnnnnn

SEQ ID NO: 167 - DNA, 1231 bp, Homo Sapiens
  misc_feature (887)..(887): n is a, c, g, or t
  misc_feature (903)..(903): n is a, c, g, or t
  misc_feature (922)..(922): n is a, c, g, or t
  misc_feature (926)..(926): n is a, c, g, or t
  misc_feature (939)..(939): n is a, c, g, or t
  misc_feature (941)..(941): n is a, c, g, or t
  misc_feature (991)..(991): n is a, c, g, or t
  misc_feature (1007)..(1007): n is a, c, g, or t
  misc_feature (1018)..(1018): n is a, c, g, or t
  misc_feature (1031)..(1031): n is a, c, g, or t
  misc_feature (1033)..(1033): n is a, c, g, or t
  misc_feature (1036)..(1036): n is a, c, g, or t
  misc_feature (1051)..(1051): n is a, c, g, or t
  misc_feature (1056)..(1056): n is a, c, g, or t
  misc_feature (1076)..(1076): n is a, c, g, or t
  misc_feature (1082)..(1083): n is a, c, g, or t
  misc_feature (1087)..(1087): n is a, c, g, or t
  misc_feature (1095)..(1095): n is a, c, g, or t
  misc_feature (1100)..(1100): n is a, c, g, or t
  misc_feature (1111)..(1111): n is a, c, g, or t
  misc_feature (1117)..(1117): n is a, c, g, or t
  misc_feature (1122)..(1122): n is a, c, g, or t
  misc_feature (1124)..(1124): n is a, c, g, or t
  misc_feature (1132)..(1133): n is a, c, g, or t
  misc_feature (1136)..(1136): n is a, c, g, or t
  misc_feature (1140)..(1142): n is a, c, g, or t
  misc_feature (1144)..(1144): n is a, c, g, or t
  misc_feature (1159)..(1159): n is a, c, g, or t
  misc_feature (1164)..(1164): n is a, c, g, or t
  misc_feature (1168)..(1168): n is a, c, g, or t
  misc_feature (1171)..(1171): n is a, c, g, or t
  misc_feature (1183)..(1183): n is a, c, g, or t
  misc_feature (1194)..(1194): n is a, c, g, or t
  misc_feature (1202)..(1202): n is a, c, g, or t
  misc_feature (1207)..(1207): n is a, c, g, or t
  misc_feature (1222)..(1222): n is a, c, g, or t
  misc_feature (1230)..(1230): n is a, c, g, or t
aatagagaaattactatgagaggatcgcatcaccatcaccatcacggatcctatttaggtgacactatagaatcgtcgacccacgcgtccgcccacgcgtccgggagcgctaaccgggggcgcggcggcggcgagggctcggcgggccattggctaccggccgcggcaaaggcagcttggggacccagcgtgcgcggggcccgcgggccgggccggggtgacctgggctgcagccatggaagaacagagggaggccctgaggaagatcatcaaaacactggctgtgaagaatgaagaaattcagagctttatctactccctgaaacagatgctgctgaacgtggaggcgaactcggcgaaggtgcaggaggacctcgaagcagagttccagtccctcttctccctcctggaggagctgaaagaaggcatgcttatgaagataaaacaggaccgtgccagccgcacctacgagctgcagaaccagctggctgcctgcacgcgggccctggagagctccgaggagcttctggagacagccaaccagactctgcaggccatggacagcgaggactttcctcaggctgccaagcaaatcaaagatggagtgaccatggcccctgccttccggctatcattgaaagcgaaggtcagtgacaacatgagtcacctcatggtggacttcgcgcaagagcggcagatgctacaggcactcaagttcctgcctgtgcccagcgcacccgtgatcgacctggctgagtccctggtggcagataactgtgtgaccctggtgtggcgcatgccggatgaggacagcaagattgaccactacgtgctggagtaccggcggaccaacttcgaggggcccgccccgcctcaaggaggaccancccctggatggtcatncgaggggcatccggcaaanaaantaacacccctganangttctcaattttgacatgaaaatacatgaactttccgtgtgaaaggcctntaacaaggccaatttnaggaaaatttntctgaaaccggtnanttnttggaaaccccaacngttcnttgtttccccttggattgcntccacnntccnaccaaaancttgnggggtgggatnatctcncccgngnaagtgggnnccntttnnncnggaaaggttcaagantttcnaggnttncccaaaaaaaanttgtaaggggngaaaaggnttttncccttaacttcccancaaaagtnt

SEQ ID NO: 168 - DNA, 1188 bp, Homo Sapiens
  misc_feature (877)..(877): n is a, c, g, or t
  misc_feature (905)..(905): n is a, c, g, or t
  misc_feature (909)..(909): n is a, c, g, or t
  misc_feature (926)..(926): n is a, c, g, or t
  misc_feature (940)..(940): n is a, c, g, or t
  misc_feature (944)..(944): n is a, c, g, or t
  misc_feature (946)..(946): n is a, c, g, or t
  misc_feature (962)..(962): n is a, c, g, or t
  misc_feature (965)..(965): n is a, c, g, or t
  misc_feature (967)..(967): n is a, c, g, or t
  misc_feature (979)..(979): n is a, c, g, or t
  misc_feature (981)..(981): n is a, c, g, or t
  misc_feature (1006)..(1006): n is a, c, g, or t
  misc_feature (1016)..(1016): n is a, c, g, or t
  misc_feature (1031)..(1031): n is a, c, g, or t
  misc_feature (1035)..(1035): n is a, c, g, or t
  misc_feature (1044)..(1044): n is a, c, g, or t
  misc_feature (1047)..(1047): n is a, c, g, or t
  misc_feature (1068)..(1068): n is a, c, g, or t
  misc_feature (1073)..(1073): n is a, c, g, or t
  misc_feature (1079)..(1079): n is a, c, g, or t
  misc_feature (1081)..(1081): n is a, c, g, or t
  misc_feature (1096)..(1096): n is a, c, g, or t
  misc_feature (1098)..(1099): n is a, c, g, or t
  misc_feature (1102)..(1102): n is a, c, g, or t
  misc_feature (1117)..(1117): n is a, c, g, or t
  misc_feature (1119)..(1119): n is a, c, g, or t
  misc_feature (1121)..(1121): n is a, c, g, or t
  misc_feature (1140)..(1142): n is a, c, g, or t
  misc_feature (1145)..(1145): n is a, c, g, or t
  misc_feature (1153)..(1153): n is a, c, g, or t
  misc_feature (1157)..(1157): n is a, c, g, or t
  misc_feature (1161)..(1161): n is a, c, g, or t
  misc_feature (1163)..(1163): n is a, c, g, or t
  misc_feature (1169)..(1169): n is a, c, g, or t
  misc_feature (1179)..(1180): n is a, c, g, or t
  misc_feature (1183)..(1183): n is a, c, g, or t
  misc_feature (1186)..(1187): n is a, c, g, or t
tagagagattactatgagaggatcgcatcaccatcaccatcacggatcctatttaggtgacactatagaatcgtcgacccacgcgtccgcccacgcgtccgatatgacctttgatttctgttgtttgtattttagcacagtgtatgcaccttcatttaaatacatctgtgtgcatacagatacgcatatatgtgtgtgcgtatgcatatatctctcatctgtagtttccaagagttcagctgaagcagatggagtcctgcagcccaggagacaccctgcatccctgctaatagtgtttgccacaagtattagtgagtcttccttattaatattttcatttcagaagactgaagcaaagctgatagtgtttgctgtttctttggcagctaagtgagggtcttgggatgacttgctgtgttcctcaagctgcactttggggccatctctgcagtattagccccctttttgcttggtggtactctgtctgtgcctgtgtgtgtgtgtgatagtcactcttgcatggcttccatgtctggtttgtggcatttggggataaggtgctgaagccagagcatttgcagtttgtttgaggcctcgttgccaatgatagatcactcctgttgacctggtatgtctgcttgcttgctgcttttccttgctttctcttggaagaggaaaggactctggtcaggcccaggctgagtgagatgagctgcagctggctcatggccttcttagagcagagagaggagtatgtcattttactaagttcctaaacaaacatttatgcaggcaacactccttgcagatccagaaactgaggcacaatagggttatgacttgctcaagaatatgtagctgctagggggtaaatcanggcatcacaatttctgttcaccgggcangaanaggctgtgaattgctancacttttttttttnaacnantactttttgacttgtnccncngaaaagtgcaanangcgtacccctttccaaatgtaaacnaaaatctgcnggaagccccccctgnaaanttctgcttnccnaaaaggaaaaacttttaaaancaaangatctnantgttatgcccccccngnnttncgggaaaaaatcccngnangaagatttttaaaaaaagnnntgnaaccgggntaangaangntcctanttcaatttgnnccnaannc

SEQ ID NO: 169 - DNA, 1273 bp, Homo Sapiens
  misc_feature (856)..(856): n is a, c, g, or t
  misc_feature (873)..(873): n is a, c, g, or t
  misc_feature (916)..(916): n is a, c, g, or t
  misc_feature (938)..(938): n is a, c, g, or t
  misc_feature (956)..(956): n is a, c, g, or t
  misc_feature (992)..(993): n is a, c, g, or t
  misc_feature (999)..(999): n is a, c, g, or t
  misc_feature (1003)..(1003): n is a, c, g, or t
  misc_feature (1005)..(1005): n is a, c, g, or t
  misc_feature (1011)..(1011): n is a, c, g, or t
  misc_feature (1013)..(1013): n is a, c, g, or t
  misc_feature (1015)..(1015): n is a, c, g, or t
  misc_feature (1025)..(1025): n is a, c, g, or t
  misc_feature (1031)..(1031): n is a, c, g, or t
  misc_feature (1033)..(1033): n is a, c, g, or t
  misc_feature (1044)..(1044): n is a, c, g, or t
  misc_feature (1060)..(1061): n is a, c, g, or t
  misc_feature (1069)..(1069): n is a, c, g, or t
  misc_feature (1073)..(1073): n is a, c, g, or t
  misc_feature (1088)..(1088): n is a, c, g, or t
  misc_feature (1100)..(1101): n is a, c, g, or t
  misc_feature (1108)..(1108): n is a, c, g, or t
  misc_feature (1110)..(1110): n is a, c, g, or t
  misc_feature (1112)..(1113): n is a, c, g, or t
  misc_feature (1125)..(1125): n is a, c, g, or t
  misc_feature (1139)..(1140): n is a, c, g, or t
  misc_feature (1154)..(1154): n is a, c, g, or t
  misc_feature (1158)..(1158): n is a, c, g, or t
  misc_feature (1174)..(1174): n is a, c, g, or t
  misc_feature (1193)..(1193): n is a, c, g, or t
  misc_feature (1198)..(1198): n is a, c, g, or t
  misc_feature (1205)..(1205): n is a, c, g, or t
  misc_feature (1209)..(1209): n is a, c, g, or t
  misc_feature (1217)..(1217): n is a, c, g, or t
  misc_feature (1220)..(1220): n is a, c, g, or t
  misc_feature (1236)..(1236): n is a, c, g, or t
  misc_feature (1242)..(1242): n is a, c, g, or t
  misc_feature (1245)..(1245): n is a, c, g, or t
  misc_feature (1254)..(1254): n is a, c, g, or t
  misc_feature (1267)..(1267): n is a, c, g, or t
  misc_feature (1273)..(1273): n is a, c, g, or t
tagagaaattactatgagaggatcgcatcaccatcaccatcacggatcctatttaggtgacactatagaatcgtcgacccacgcgtccgatgctctgaaagacatccttgggcccccgatgtatgaaatggaggtatctcagcgtttgagtcagccaggagtagcaataggtttggcttggactcccttaggtggagaaatcatgttcgtggaggcgagtcgaatggatggcgagggccagttaactctgaccggccagctcggggacgtgatgaaggagtccgcccacctcgctatcagctggctccgcagcaacgcaaagaagtaccagctgaccaatgcttttggaagttttgatcttcttgacaacacagacatccatctgcacttcccagctggagctgtcacaaaagatggaccatctgctggagttaccatagtaacctgtctcgcctcactttttagtgggcggctggtacgttcagatgtagccatgactggagaaattacactgagaggtcttgttcttccagtgggtggaattaaagacaaagtgctggcggcacacagagcgggactgaagcaagtcattattcctcggagaaatgaaaaagaccttgagggaatcccaggcaacgtacgacaggatttaagttttgtcacagcaagctgcctggatgaggttcttaatgcagcttttgatggtggctttactgtcaagaccagacctggtctgttaaatagcaaactgtaggtccaaatctcaattttttagaattttaagttatgaagtgctcaaaggtactgacacagttgattttattcacaccattaggggtatgcaagatgtccctgnttttataaacataatcncaacagtaataaaacctcaagtagtggctagtgtttagtatanaaatataaaaatgttgatttantaaactgaataaaaatcnaaattcttgtctttttaagggggaatcccttactgnnccctgnaaananataacnanantggttctcancaaaantnctcccaaaaanaaaaaccatctgtaannacctgggnaacnttgttaaaaaaatgntaacatttttcnnggctccncnannaaggcccccctngaaatcaaaatccnnggggaggggggggnaaanaaaatttggggttttnaaaaaaacccttcccgggnaattnctgccgncccnccctcaanttnccagggaacccccggnaaaaancantacccttanggggaattccccnggaaan

SEQ ID NO: 170 - DNA, 1329 bp, Homo Sapiens
  misc_feature (840)..(840): n is a, c, g, or t
  misc_feature (870)..(870): n is a, c, g, or t
  misc_feature (897)..(897): n is a, c, g, or t
  misc_feature (911)..(911): n is a, c, g, or t
  misc_feature (922)..(922): n is a, c, g, or t
  misc_feature (932)..(932): n is a, c, g, or t
  misc_feature (948)..(948): n is a, c, g, or t
  misc_feature (982)..(982): n is a, c, g, or t
  misc_feature (990)..(990): n is a, c, g, or t
  misc_feature (999)..(999): n is a, c, g, or t
  misc_feature (1009)..(1009): n is a, c, g, or t
  misc_feature (1013)..(1013): n is a, c, g, or t
  misc_feature (1016)..(1016): n is a, c, g, or t
  misc_feature (1020)..(1020): n is a, c, g, or t
  misc_feature (1023)..(1023): n is a, c, g, or t
  misc_feature (1036)..(1036): n is a, c, g, or t
  misc_feature (1060)..(1060): n is a, c, g, or t
  misc_feature (1062)..(1062): n is a, c, g, or t
  misc_feature (1093)..(1093): n is a, c, g, or t
  misc_feature (1108)..(1108): n is a, c, g, or t
  misc_feature (1134)..(1134): n is a, c, g, or t
  misc_feature (1145)..(1147): n is a, c, g, or t
  misc_feature (1152)..(1152): n is a, c, g, or t
  misc_feature (1165)..(1166): n is a, c, g, or t
  misc_feature (1168)..(1168): n is a, c, g, or t
  misc_feature (1195)..(1195): n is a, c, g, or t
  misc_feature (1198)..(1198): n is a, c, g, or t
  misc_feature (1201)..(1201): n is a, c, g, or t
  misc_feature (1207)..(1207): n is a, c, g, or t
  misc_feature (1216)..(1216): n is a, c, g, or t
  misc_feature (1228)..(1228): n is a, c, g, or t
  misc_feature (1257)..(1257): n is a, c, g, or t
  misc_feature (1260)..(1260): n is a, c, g, or t
  misc_feature (1264)..(1264): n is a, c, g, or t
  misc_feature (1266)..(1266): n is a, c, g, or t
  misc_feature (1287)..(1288): n is a, c, g, or t
  misc_feature (1291)..(1292): n is a, c, g, or t
  misc_feature (1308)..(1308): n is a, c, g, or t
  misc_feature (1314)..(1314): n is a, c, g, or t
  misc_feature (1319)..(1319): n is a, c, g, or t
  misc_feature (1328)..(1328): n is a, c, g, or t
agagaaattactatgagaggatcgcatcaccatcaccatcacggatcctatttaggtgacactatagaatcgtcgacccacgcgtccgctgccattgtgaagatgcgcgtggctggcactgccagtgggacccagcatgccggtgacttcatctgcacagtgtatctggaagagaagaaggcagagactgagcagcatatcaaggtcccagcatccatgactgctgaggagctcaccctggagatcctggatcgccggaacgtgggcatcagggagaaggactattggacctgctttgaggtcaacgagagggaggaggcagagcgccccctgcactttgcggagaaggtgctgcccatcctgcacgggctgggcacggacagccacctggtggtgaagaagcaccaggccatggaggccatgctgctgtacctggccagccgtgtcggtgacaccaagcatggcatgatgaagttccgtgaggaccgcagcctcctgggcctgggcctgccctcaggtggcttccacgatcgctacttcatcctcaacagcagctgcttgcggctctacaaggaggtccggagccagaggccgtggagcggggcccctgagaccagtcaccggcctgagaaggagtggcctattaagagtctcaaagtctacctgggagtgaagaagaaactcaggccacccacctgctggggcttcacagtggtgcatgagacagagaaacatgagaagcagcagtggtacctctgctgtgacacacagatggagctccgggagtggttcgctacctttctgtttgtgcagcatgacggcctggtgtggccctcaganccctcacgcgtgtcccgggcagtgcctgangtccggctgggtagtgtgtcactgatnccccttcgaggtantgaaaatgaantgcgccggantgtggctgccttcacngcggaacctctgtctcttctgcgcaacgtctgancacaggancccatcctnggctctaganttcnccnctgnaanccttctgttcaanacccttatgctccaggcctgattnanccaccggggggtgcatgggaaaatgcacccnaaaaccaaatcctcnatcctgattgaaaatgggttccccgncagggtgggannnaacanggttaaccttggnnanaaccccccccaactttttcaggggttnaanctnttggcnaacctgttnccccccgggttncctttctttgggggtggaaaagggctaantcngaantnggggaacccccccttttaaanntanncccgggccctccaaanaacccnttttncccaaatcna

SEQ ID NO: 171 - DNA, 1030 bp, Homo Sapiens
  misc_feature (89)..(89): n is a, c, g, or t
  misc_feature (720)..(720): n is a, c, g, or t
  misc_feature (725)..(726): n is a, c, g, or t
  misc_feature (732)..(732): n is a, c, g, or t
  misc_feature (734)..(734): n is a, c, g, or t
  misc_feature (737)..(738): n is a, c, g, or t
  misc_feature (742)..(742): n is a, c, g, or t
  misc_feature (744)..(744): n is a, c, g, or t
  misc_feature (746)..(747): n is a, c, g, or t
  misc_feature (764)..(764): n is a, c, g, or t
  misc_feature (770)..(770): n is a, c, g, or t
  misc_feature (789)..(789): n is a, c, g, or t
  misc_feature (804)..(804): n is a, c, g, or t
  misc_feature (811)..(811): n is a, c, g, or t
  misc_feature (883)..(884): n is a, c, g, or t
  misc_feature (906)..(906): n is a, c, g, or t
  misc_feature (930)..(931): n is a, c, g, or t
  misc_feature (951)..(951): n is a, c, g, or t
  misc_feature (982)..(982): n is a, c, g, or t
  misc_feature (987)..(988): n is a, c, g, or t
  misc_feature (997)..(997): n is a, c, g, or t
  misc_feature (999)..(999): n is a, c, g, or t
  misc_feature (1003)..(1003): n is a, c, g, or t
  misc_feature (1022)..(1022): n is a, c, g, or t
  misc_feature (1025)..(1025): n is a, c, g, or t
gtatagagaaattactatgagaggatcgcatcaccatcaccatcacggatcctatttaggtgacactatagaatcgtcgacccacgcgntccggccgcaagacaccacgactcccagaggaccttgcgtcgggcaagaaagactacaccttccagaggcctctgcggcgccgcgacaggaagcggcgggcgagccgagtgtccttgcgcgtggatccgagcgaccatggtggcccgggtgtggtcgctgatgaggttcctcatcaagggaagtgtggctgggggcgccgtctacctggtgtacgaccaggagctgctggggcccagcgacaagagccaggcagccctacagaaggctggggaggtggtcccccccgccatgtaccagttcagccagtacgtgtgtcagcagacaggcctgcagataccccagctcccagcccctccaaagatttactttcccatccgtgactcctggaatgcaggcatcatgacggtgatgtcagctctgtcggtggccccctccaaggcccgcgagtactccaaggagggctgggagtatgtgaaggcgcgcaccaagtagcgagtcagcaggggccgcctgccccggccagaacgggcagggctgccactgacctgaagactccggactgggaccccactccgagggcagctcccggccttgccggcccaataaaggacttctgaagtgaataaaaanaaaannaatttnanaannaaanananngggcggccgctccctanagtgantcgtattaagcttaattanctgaacttggactcntgttganagatccagtaatgacctcaaaactccatctggatttgttcaaaacgctcggttgccgccggggcgttttttnnttgggtaaaaatccaaacctanctttggcgaaatttttcaggagcnnagggaaagctaaaattgganaaaaaaaaatcactggatataccacccgttnaatanntcccaatgncntccnaaaaaaaattttgaggcanttncaatc

SEQ ID NO: 172 - DNA, 934 bp, Homo Sapiens
  misc_feature (2)..(3): n is a, c, g, or t
  misc_feature (8)..(8): n is a, c, g, or t
  misc_feature (867)..(867): n is a, c, g, or t
  misc_feature (896)..(896): n is a, c, g, or t
  misc_feature (903)..(903): n is a, c, g, or t
  misc_feature (909)..(909): n is a, c, g, or t
anngaggnaattactatgagaggatcgcatcaccatcaccatcacggatcctatttaggtgacactatagaatcgtcgacccacgcgtccgagaaatccctgcaaagatcagcaaaggtggtttacatcttggagaaaaaacattctcgagcagcaaccggcttcctcaaactcttggctgataagaacagcgaactgtttaggaaatacgccctgttttctccctcagaccaccgagtgcctagaatttatgtgcctctcaaggactgtccccaggactttgtggcacggcctaaagattatgccaacacactgttcatctgccgcattgtggactggaaggaggactgcaattttgccctggggcagctggctaagagtcttgggcaggctggtgaaattgagcctgaaacagaaggaatactaacagagtatggcgtggatttctctgatttctcttcagaagttctagaatgtcttcctcaaggcctgccatggacaattccaccagaggagttcagcaagagaagggatttaagaaaagactgtatcttcaccattgacccatcaaccgcccgagacctcgatgatgccctctcctgcaagccactcgctgacggcaacttcaaagtgggagttcacattgctgacgtgagttactttgttccggagggatctgatctggataaagtggctgccgagagggctacaagcgtctacttggttcaaaaggtggtccccatgcttcccaggctgctgtgtgaggagctgtgcagcctcaaccccatgtccgacaagctgaccttctctgtgatctggacactgactccagaggggcaaagatccttgatgaatggtttggccggnaccatcatccgctcctgcaccaaacttanctacgancatgcncagagcatgattgaaaagcccaact

SEQ ID NO: 173 - DNA, 984 bp, Homo Sapiens
  misc_feature (2)..(2): n is a, c, g, or t
  misc_feature (667)..(667): n is a, c, g, or t
  misc_feature (724)..(724): n is a, c, g, or t
  misc_feature (815)..(815): n is a, c, g, or t
  misc_feature (871)..(871): n is a, c, g, or t
  misc_feature (910)..(910): n is a, c, g, or t
  misc_feature (922)..(922): n is a, c, g, or t
  misc_feature (925)..(925): n is a, c, g, or t
  misc_feature (928)..(928): n is a, c, g, or t
  misc_feature (935)..(935): n is a, c, g, or t
  misc_feature (937)..(937): n is a, c, g, or t
  misc_feature (946)..(946): n is a, c, g, or t
  misc_feature (950)..(950): n is a, c, g, or t
  misc_feature (955)..(955): n is a, c, g, or t
  misc_feature (962)..(963): n is a, c, g, or t
  misc_feature (970)..(970): n is a, c, g, or t
  misc_feature (973)..(977): n is a, c, g, or t
  misc_feature (979)..(979): n is a, c, g, or t
  misc_feature (983)..(984): n is a, c, g, or t
antagagaaattactatgagaggatcgcatcaccatcaccatcacggatcctatttaggtgacactatagaatcgtcgacccacgcgtccgacaagatggccgctgcgcgcccagaggcccagagtcggagctcaccgactccggagtcgcgatcccaggagccactggacctggtcctggtgcctgatgactgccggcctggcacacccccgagtgacctcatcgagatccaggtggtgaaggtgacggacaccacgctggtccctgagcccccggagccaggttctttccactgtgccttgtgccctgctgccttccggctggtttccgagctgctgttccacgaacatggccacttggctggggccgagggaggcgggcagggtggggacccgagccggtgccacgtgtgcggccacagctgcccgggccccgccagcctgcgcgcgcactacagcttgcacacgggggagcggccctaccgctgcgcgctctgcccccgcgccttcaaggccttggcgcccctgctccggcaccagcaccggcacggggtggagccgggcacctctcggaggcctccggacacagcggccgttgcagaacagaggcccggggtggccccggagagggcggaggtggtgatggcggcggcggcggcgggcgcancggtggggaagccttttgcctgcaggttctgcgccaagcccttccgccgctcctcanacatgcgagaccacgagcgcgtgcacactggcgagcggccataccattgcggcatctgcggcaagggcttcacccagtcctcggtgcttancggccacgcccgcatccacactggcgaagcgcccgttccgctgcacgctctgcgancgcaccttcaacaactcctccaacttccgcaagcaccancgcacccacttncanggnccggggncnggggctggnaaantctgnaggccanntggctcntcnnnnntnaagnn

SEQ ID NO: 174 - DNA, 1292 bp, Homo Sapiens
  misc_feature (799)..(799): n is a, c, g, or t
  misc_feature (931)..(931): n is a, c, g, or t
  misc_feature (938)..(938): n is a, c, g, or t
  misc_feature (962)..(962): n is a, c, g, or t
  misc_feature (965)..(965): n is a, c, g, or t
  misc_feature (991)..(992): n is a, c, g, or t
  misc_feature (1018)..(1018): n is a, c, g, or t
  misc_feature (1027)..(1027): n is a, c, g, or t
  misc_feature (1041)..(1041): n is a, c, g, or t
  misc_feature (1049)..(1049): n is a, c, g, or t
  misc_feature (1062)..(1062): n is a, c, g, or t
  misc_feature (1064)..(1064): n is a, c, g, or t
  misc_feature (1069)..(1069): n is a, c, g, or t
  misc_feature (1072)..(1072): n is a, c, g, or t
  misc_feature (1081)..(1081): n is a, c, g, or t
  misc_feature (1085)..(1085): n is a, c, g, or t
  misc_feature (1091)..(1091): n is a, c, g, or t
  misc_feature (1099)..(1099): n is a, c, g, or t
  misc_feature (1123)..(1123): n is a, c, g, or t
  misc_feature (1126)..(1126): n is a, c, g, or t
  misc_feature (1128)..(1128): n is a, c, g, or t
  misc_feature (1138)..(1138): n is a, c, g, or t
  misc_feature (1143)..(1143): n is a, c, g, or t
  misc_feature (1150)..(1150): n is a, c, g, or t
  misc_feature (1153)..(1153): n is a, c, g, or t
  misc_feature (1158)..(1158): n is a, c, g, or t
  misc_feature (1162)..(1163): n is a, c, g, or t
  misc_feature (1169)..(1170): n is a, c, g, or t
  misc_feature (1172)..(1172): n is a, c, g, or t
  misc_feature (1177)..(1177): n is a, c, g, or t
  misc_feature (1184)..(1184): n is a, c, g, or t
  misc_feature (1192)..(1192): n is a, c, g, or t
  misc_feature (1205)..(1206): n is a, c, g, or t
  misc_feature (1213)..(1213): n is a, c, g, or t
  misc_feature (1223)..(1223): n is a, c, g, or t
  misc_feature (1226)..(1226): n is a, c, g, or t
  misc_feature (1228)..(1228): n is a, c, g, or t
  misc_feature (1250)..(1250): n is a, c, g, or t
  misc_feature (1253)..(1253): n is a, c, g, or t
  misc_feature (1263)..(1263): n is a, c, g, or t
  misc_feature (1271)..(1271): n is a, c, g, or t
  misc_feature (1284)..(1284): n is a, c, g, or t
  misc_feature (1288)..(1289): n is a, c, g, or t
tagagaaattactatgagaggatcgcatcaccatcaccatcacggatcctatttaggtgacactatagaatcgtcgacccacgcgtccgaacgcagagcgcgcgctccaggtaaaggctgctacgcccaggacagggttctcacggtggaggaaaggacttctgcgggataccacgctgtgcgccaaaaagccgggcggcttcggagccagagcagcggctctgcggcgcaggcggcgggtcggggcagccttgaagccgggatccggcccgaaggggtctttttggagttcctgagctcagtgccccagaaggcacatacttcatatgaaatatgaaggatttcatactgcacaagaaaaagccttgagaaagacagaattgcttgtggaccgtgcgtgttccaccccacctgggccccagaccgtgctgatccttgatgagctctcggattccttgtgcagagtgaccgacttgtttcgaaatgaccaggctggcagttggctgagccagtctcctagaaccctttgaagcactggatgcaggctgatgagctgccataaacgtctttgagtcccaacactgctcaggaactgcatatcataccaaagtctgcctgtgtgatcctttaatttgtgaatgtaaaaactgaggtgggaggcaaatactgatgttctcaaagacccgtctcagctattccattcaaacagagcccagaatcttcaaaattctgcttcttcagcttacctcctgtctcaggctggttccccagaagcatcccagagatgcagatttgtganaaagtgatgtgttgggcagtgtcccctgcagggaagtgaggatgcaagacagtgagaaggaagccaagcaagagtgcaatgtcaagcaaggtcccgtgcttgcagggcactggctcctcccacagaggaaanttggaantgaaacccctccctcattggtcanggncatctcaaaggatgcatgtttctagnntcccccctctctctgccacaggtaangaaactccnaaacctgagggcanccctcccnaaaaaaacatggntntgganccnaaaataaancaanctgganccaggggntgaaatggaaaggacccaggaaanaantntgctcccccntgatnaatgccnatnctggncacnnctgttnncnaaccntgctaanttgggaanaaaaaaataaaanntcccggngcccctaagnaantnttcctccccaacccccaagggnatnaggaaaaacncccaaagnttcggaatggccnaaanngaa

SEQ ID NO: 175 - DNA, 1279 bp, Homo Sapiens
  misc_feature (876)..(876): n is a, c, g, or t
  misc_feature (946)..(946): n is a, c, g, or t
  misc_feature (951)..(951): n is a, c, g, or t
  misc_feature (955)..(955): n is a, c, g, or t
  misc_feature (959)..(959): n is a, c, g, or t
  misc_feature (985)..(985): n is a, c, g, or t
  misc_feature (994)..(995): n is a, c, g, or t
  misc_feature (997)..(997): n is a, c, g, or t
  misc_feature (1009)..(1009): n is a, c, g, or t
  misc_feature (1015)..(1015): n is a, c, g, or t
  misc_feature (1021)..(1021): n is a, c, g, or t
  misc_feature (1036)..(1036): n is a, c, g, or t
  misc_feature (1062)..(1062): n is a, c, g, or t
  misc_feature (1071)..(1071): n is a, c, g, or t
  misc_feature (1092)..(1092): n is a, c, g, or t
  misc_feature (1099)..(1099): n is a, c, g, or t
  misc_feature (1103)..(1103): n is a, c, g, or t
  misc_feature (1120)..(1120): n is a, c, g, or t
  misc_feature (1125)..(1125): n is a, c, g, or t
  misc_feature (1127)..(1127): n is a, c, g, or t
  misc_feature (1146)..(1146): n is a, c, g, or t
  misc_feature (1150)..(1150): n is a, c, g, or t
  misc_feature (1164)..(1164): n is a, c, g, or t
  misc_feature (1177)..(1178): n is a, c, g, or t
  misc_feature (1186)..(1186): n is a, c, g, or t
  misc_feature (1189)..(1191): n is a, c, g, or t
  misc_feature (1194)..(1194): n is a, c, g, or t
  misc_feature (1196)..(1196): n is a, c, g, or t
  misc_feature (1200)..(1200): n is a, c, g, or t
  misc_feature (1204)..(1206): n is a, c, g, or t
  misc_feature (1216)..(1216): n is a, c, g, or t
  misc_feature (1218)..(1218): n is a, c, g, or t
  misc_feature (1222)..(1222): n is a, c, g, or t
  misc_feature (1234)..(1234): n is a, c, g, or t
  misc_feature (1238)..(1238): n is a, c, g, or t
  misc_feature (1243)..(1243): n is a, c, g, or t
  misc_feature (1248)..(1248): n is a, c, g, or t
  misc_feature (1254)..(1254): n is a, c, g, or t
  misc_feature (1257)..(1257): n is a, c, g, or t
  misc_feature (1260)..(1260): n is a, c, g, or t
  misc_feature (1270)..(1270): n is a, c, g, or t
  misc_feature (1274)..(1274): n is a, c, g, or t
aatagagagattactatgagaggatcgcatcaccatcaccatcacggatcctatttaggtgacactatagaatcgtcgacccacgcgtccgcccacgcgtccgcagaaatggattcgaaataccagtgtgtgaagctgaatgatggtcacttcatgcctgtcctgggatttggcacctatgcgcctgcagaggttcctaaaagtaaagctctagaggccgtcaaattggcaatagaagccgggttccaccatattgattctgcacatgtttacaataatgaggagcaggttggactggccatccgaagcaagattgcagatggcagtgtgaagagagaagacatattctacacttcaaagctttggagcaattcccatcgaccagagttggtccgaccagccttggaaaggtcactgaaaaatcttcaattggactatgttgacctctatcttattcattttccagtgtctgtaaagccaggtgaggaagtgatcccaaaagatgaaaatggaaaaatactatttgacacagtggatctctgtgccacatgggaggccatggagaagtgtaaagatgcaggattggccaagtccatcggggtgtccaacttcaaccacaggctgctggagatgatcctcaacaagccagggctcaagtacaagcctgtctgcaaccaggtggaatgtcatccttacttcaaccagagaaaactgctggatttctgcaagtcaaaagacattgttctggttgcctatagtgctctgggatcccatcgagaaagaaccatgggtggacccgaactccccggtgctcttggaggacccagtcctttgtgccttggcaaaaagcacaagcgaaccccagcccctgattgncctgcgctaccaactgcagcgtggggttgtggtcctggccaaaagctaccatgagcagcgcatcaaacanaacgngcangtgnttgaattccagttgacttccgaaganatgaagccnnanatggcctaacanaaatgngcgaanttttgacccttgaanttttggcgggcccccctaattatccnttttcggangaaaattaacatggaaggccntgcttgnggcngcccaaaagccctgcgngggangngaacccaagaaaggccctngcgnggggacgggaccanccccccgggtaanncccccgcnggnnnctncngaancctnnnctaacccccncncggnaaaaaaaaaaantttnttttnttttnaaaaanaangcncccccaaaanttcncccaa

SEQ ID NO: 176 - DNA, 1196 bp, Homo Sapiens
  misc_feature (862)..(862): n is a, c, g, or t
  misc_feature (943)..(943): n is a, c, g, or t
  misc_feature (958)..(958): n is a, c, g, or t
  misc_feature (962)..(962): n is a, c, g, or t
  misc_feature (991)..(991): n is a, c, g, or t
  misc_feature (1001)..(1001): n is a, c, g, or t
  misc_feature (1011)..(1011): n is a, c, g, or t
  misc_feature (1030)..(1030): n is a, c, g, or t
  misc_feature (1033)..(1033): n is a, c, g, or t
  misc_feature (1038)..(1038): n is a, c, g, or t
  misc_feature (1059)..(1059): n is a, c, g, or t
  misc_feature (1062)..(1062): n is a, c, g, or t
  misc_feature (1071)..(1071): n is a, c, g, or t
  misc_feature (1100)..(1100): n is a, c, g, or t
  misc_feature (1112)..(1112): n is a, c, g, or t
  misc_feature (1114)..(1114): n is a, c, g, or t
  misc_feature (1118)..(1118): n is a, c, g, or t
  misc_feature (1121)..(1121): n is a, c, g, or t
  misc_feature (1123)..(1123): n is a, c, g, or t
  misc_feature (1129)..(1129): n is a, c, g, or t
  misc_feature (1138)..(1138): n is a, c, g, or t
  misc_feature (1144)..(1144): n is a, c, g, or t
  misc_feature (1150)..(1150): n is a, c, g, or t
  misc_feature (1153)..(1154): n is a, c, g, or t
  misc_feature (1166)..(1166): n is a, c, g, or t
  misc_feature (1179)..(1180): n is a, c, g, or t
  misc_feature (1188)..(1188): n is a, c, g, or t
  misc_feature (1190)..(1190): n is a, c, g, or t
  misc_feature (1192)..(1196): n is a, c, g, or t
atagagaaaattactatgagaggatcgcatcaccatcaccatcacggatcctatttaggtgacactatagaatcgtcgacccacgcgtccgggaagattctcaccactgaagggcgtaatgcacttatccacaaatcatctgttaattgtccttttagtagccaagacatgaagtacccatctcccttctttgtatttggtgaaaagattcgaactcgagccatctctgctaaaggcatgactttagtcacccccctgcagttgcttctctttgcctccaagaaagtccaatctgatgggcagattgtgcttgtagatgactggattaaactgcaaatatctcatgaagctgctgcctgtatcactggtctccgggcagccatggaggctttggttgttgaagtaaccaaacaacctgctatcatcagccagttggaccccgtaaatgaacgtatgctgaacatgatccgtcagatctctagaccctcagctgctggtatcaaccttatgattggcagtacacggtatggagatggtccacgtcctcccaagatggcccgatacgacaatggaagcggatatagaaggggaggttctagttacagtggtggaggctatggcggtggctatagcagtggaggctatggtagcggaggctatggtggcagcgccaactcctttcgggcaggatatggtgcaggtgttggtggaggctatagaggagtttcccgaggtggctttagaggcaactctggaggagactacagagggcctagtggaggctacagaggatctgggggattccagcgaggaggtggtaggggggcctatggaactggctactttggacagggaagaggangtggcggctattaaaacttggttatgtcagttcctgtgtgtagacagtaaggaaaaaaaaggcatgctatgtgttacgtgnttttttccagtatgnttanttggccaccaaaaagtaaatgcattttcncccattctgnggttcattgnagtttaaggaaaccaagcnaanaaaangcataagggatttggtttaantanggaaaaaanaaccgatctcttaaaaaaccccagtttgnattttttctttnangaanaananttgccnttaaaaaantgggantttccnggnnttcgtttaaacnaaaaaaaaaaagnnttcccccnanannnnn

SEQ ID NO: 177 - DNA, 914 bp, Homo Sapiens
  misc_feature (865)..(865): n is a, c, g, or t
  misc_feature (891)..(914): n is a, c, g, or t
atagagaaattactatgagaggatcgcatcaccatcaccatcacggatcctatttaggtgacactatagaatcgtcgacccacgcgtccgcggtgacagcgtttaacaaagcttagagaaacctccaggagactgctatcatggcagagaagcccaagctccactacttcaatgcacggggcagaatggagtccacccggtggctcctggctgcagctggagtagagtttgaagagaaatttataaaatctgcagaagatttggacaagttaagaaatgatggatatttgatgttccagcaagtgccaatggttgagattgatgggatgaagctggtgcagaccagagccattctcaactacattgccagcaaatacaacctctatgggaaagacataaaggagagagccctgattgatatgtatatagaaggtatagcagatttgggtgaaatgatcctccttctgcccgtatgtccacctgaggaaaaagatgccaagcttgccttgatcaaagagaaaataaaaaatcgctacttccctgcctttgaaaaagtcttaaagagccatggacaagactaccttgttggcaacaagctgagccgggctgacattcatctggtggaacttctctactacgtcgaggagcttgactccagtcttatctccagcttccctctgctgaaggccctgaaaaccagaatcagcaacctgcccacagtgaagaagtttctacagcctggcagcccaaggaagcctcccatggatgagaaatctttagaagaagcaaggaagattttcaggttttaataacgcagtcatggaggccaagaacttgcaataccaatgttctaaagttttgcacnaataaagtactttacctaagtggaannnnnnnnnnnnnnnnnnnnnnnn

SEQ ID NO: 178 - DNA, 1161 bp, Homo Sapiens
  misc_feature (5)..(11): n is a, c, g, or t
  misc_feature (14)..(14): n is a, c, g, or t
  misc_feature (25)..(25): n is a, c, g, or t
  misc_feature (817)..(817): n is a, c, g, or t
  misc_feature (881)..(881): n is a, c, g, or t
  misc_feature (884)..(884): n is a, c, g, or t
  misc_feature (900)..(900): n is a, c, g, or t
  misc_feature (960)..(960): n is a, c, g, or t
  misc_feature (988)..(988): n is a, c, g, or t
  misc_feature (991)..(991): n is a, c, g, or t
  misc_feature (1000)..(1000): n is a, c, g, or t
  misc_feature (1005)..(1005): n is a, c, g, or t
  misc_feature (1008)..(1008): n is a, c, g, or t
  misc_feature (1010)..(1010): n is a, c, g, or t
  misc_feature (1019)..(1019): n is a, c, g, or t
  misc_feature (1024)..(1024): n is a, c, g, or t
  misc_feature (1039)..(1039): n is a, c, g, or t
  misc_feature (1079)..(1079): n is a, c, g, or t
  misc_feature (1083)..(1083): n is a, c, g, or t
  misc_feature (1086)..(1086): n is a, c, g, or t
  misc_feature (1095)..(1095): n is a, c, g, or t
  misc_feature (1109)..(1109): n is a, c, g, or t
  misc_feature (1116)..(1116): n is a, c, g, or t
  misc_feature (1123)..(1123): n is a, c, g, or t
  misc_feature (1127)..(1127): n is a, c, g, or t
  misc_feature (1133)..(1133): n is a, c, g, or t
  misc_feature (1138)..(1138): n is a, c, g, or t
  misc_feature (1146)..(1146): n is a, c, g, or t
  misc_feature (1152)..(1156): n is a, c, g, or t
  misc_feature (1158)..(1158): n is a, c, g, or t
  misc_feature (1160)..(1161): n is a, c, g, or t
aagannnnnnnatngagaaattacnatggagaggatcgcatcaccatcaccactcacgggatcctatttaggtgacacgtatagaatcgtcgacccacgcgctccgggagttttcggtggctcagctgggtaaccggggatcaccatggcggcctcattggtggggaagaagatcgtgtttgtaacggggaacgccaagaagctggaggaggtcgttcagattctaggagataagtttccatgcactttggtggcacagaaaattgacctgccggagtaccagggggagccggatgagatttccatacagaaatgtcaggaggcagttcgccaggtacaggggcccgtgctggttgaggacacttgtctgtgcttcaatgcccttggagggctccccggcccctacataaagtggtttctggagaagttaaagcctgaaggtctccaccagctcctggccgggttcgaggacaagtcagcctatgcgctctgcacgtttgcactcagcaccggggacccaagccagcccgtgcgcctgttcaggggccggacctcgggccggatcgtggcacccagaggctgccaggactttggctgggacccctgctttcagcctgatggatatgagcagacgtacgcagagatgcctaaggcggagaagaacgctgtctcccatcgcttccgggccctgctggagctgcaggagtactttggcagtttggcagcttgacttctgcagctggaggaggcccctcaggccggggatctggggagggctagcccaaaacctcccgcatcgggcaggcaccccctgaantacttccttcagggtttcccctttgtgagggtgtcgagtaacctcaccggcctgtctggaggancanctggctctgctctganaaaactctggcaagtggaaccccattctcttgccccttaagattcactgctctctcctanagccgccaggcctggggtcctgaaaagnacnttgggtggntaaanctntncttggtggnaattnaagcccttggggaanaaaccatgcaaatcccccttccatggtttttaaatgcaanaaanaanattttctgnatgaaacttgtttnccaaaanaaacccncctntttttnttttnaaaaaaanaaaaannnnnanann

SEQ ID NO: 179 - DNA, 1019 bp, Homo Sapiens
  misc_feature (1)..(1): n is a, c, g, or t
  misc_feature (768)..(768): n is a, c, g, or t
  misc_feature (780)..(780): n is a, c, g, or t
  misc_feature (871)..(871): n is a, c, g, or t
  misc_feature (919)..(919): n is a, c, g, or t
  misc_feature (925)..(925): n is a, c, g, or t
  misc_feature (935)..(935): n is a, c, g, or t
  misc_feature (969)..(969): n is a, c, g, or t
  misc_feature (983)..(984): n is a, c, g, or t
  misc_feature (990)..(990): n is a, c, g, or t
  misc_feature (998)..(998): n is a, c, g, or t
  misc_feature (1000)..(1000): n is a, c, g, or t
  misc_feature (1005)..(1005): n is a, c, g, or t
  misc_feature (1007)..(1007): n is a, c, g, or t
  misc_feature (1009)..(1009): n is a, c, g, or t
  misc_feature (1018)..(1018): n is a, c, g, or t
naatagagagattactatgagaggatcgcatcaccatcaccatcacggatcctatttaggtgacactatagaatcgtcgacccacgcgtccggcggagcagacgcggaggctggtggcccctgggcgagatgccgtacgccaaccagcctaccgtgcggatcacggagctcactgacgagaatgtcaagttcatcatcgagaacaccgacctggcggtggccaattcgattcggagggtcttcatcgctgaggttcccataatagccattgactgggttcagattgatgccaattcctcagtccttcatgatgaattcattgctcacaggcttggattaattcccctcattagtgatgacattgtggacaagctgcagtactctcgggactgcacatgtgaggagttctgccccgagtgctcggtggagttcaccctcgatgtgcggtgcaatgaagaccagacgcgacatgtcacgtctcgagacctcatctccaacagcccccgggtcattccggtgacatcccggaaccgagataatgaccccaatgactacgtggagcaggatgacatcctcatcgtcaagttgagaaagggccaggagctgagacttcgagcctatgccaaaaagggctttggcaaggagcatgccaagtggaaccctactgcaggggtggcttttgaatacgatccagacaatgccctgaggcacacagtgtaccccaagcccgaggaatggccaaagagtgagtactcggagctggatgangatgagtcgcangctccctatgaccccaacggcaagccagaaaggttttactacaatgtggagtcctgtggctctctgcgtcctgaaaaccattgtcctgtcnaccctctcaggattgaaaaaaaaactgagtgatttacaaactcaattnaacccncgaaatccanaatgatgtgcttacccataaattaacttgcagcnttgcctgctttcannaaaaanggaaaatncnggccnancnacttggaant

SEQ ID NO: 180 - DNA, 682 bp, Homo Sapiens
  misc_feature (681)..(682): n is a, c, g, or t
tagagaaattactatgagaggatcgcatcaccatcaccatcacggatcctatttaggtgacactatagaatcgtcgacccacgcgtccgagcactggctgaccgagagtgcccgcctcatctcccacatgggctctgtggtggagtgggtcacacccctgggcgtccccgtcatccagccctatcgcctggactccaaggtcaagcaaataggaggtggaattcagagcatcacctacacccacaacggagacatcagccgaaagcccaacacacgtaagcagaagaacggcttcccgcccaacttcatccactcgctggactcctcccacatgatgctcaccgccctgcactgctacaggaagggcctgaccttcgtctctgtgcacgactgttactggactcacgcagctgatgtctccgtcatgaaccaggtgtgccgggagcagtttgtccgcttgcacagcgagcccatcctgcaggacctgtccagattcctggtcaagcggttctgctctgagccccagaagatcttggaggccagccagctgaaggagacactgcaggcggtgcccaagccaggggccttcgacctggagcaggtgaagcgttccacctacttcttcagctgacaccccgtgagccttgtcagtgtgtaaataaagctcttttgccacccccnn

SEQ ID NO: 181 - DNA, 877 bp, Homo Sapiens
  misc_feature (1)..(1): n is a, c, g, or t
  misc_feature (849)..(850): n is a, c, g, or t
  misc_feature (852)..(852): n is a, c, g, or t
  misc_feature (857)..(877): n is a, c, g, or t
naatagagaaattaactatgagaggatcgcatcaccatcaccatcacggatcctatttaggtgacactatagaatcgtcgacccacgcgtccgcccacgcgtccggcggggatctgtgccgtgtcctcagggccaaggagagcctgaaggagctcagcctggccggcaacgagctgggggatgagggtgcccgactgctgtgtgagaccctgctggaacctggctgccagctggagtcgctgtgggtgaagtcctgcagcttcacagccgcctgctgctcccacttcagctcagtgctggcccagaacaggtttctcctggagctacagataagcaacaacaggctggaggatgcgggcgtgcgggagctgtgccagggcctgggccagcctggctctgtgctgcgggtgctctggttggccgactgcgatgtgagtgacagcagctgcagcagcctcgccgcaaccctgttggccaaccacagcctgcgtgagctggacctcagcaacaactgcctgggggacgccggcatcctgcagctggtggagagcgtccggcagccgggctgcctcctggagcagctggtcctgtacgacatttactggtctgaggagatggaggaccggctgcaggccctggagaaggacaagccatccctgagggtcatctcctgaggctcttcctgctgctgctctccctggacgaccggcctcgaggcaaccctggggcccaccagcccctgccatgctctcaccctgcatatctaggtttgaagagaaacgctcagatccgcttatttctgccagtatattttggacactttataatcattaaagcactttcttggcnnanaaaannnnnnnnnnnnnnnnnnnnn

SEQ ID NO: 182 - DNA, 1034 bp, Homo Sapiens
  misc_feature (931)..(931): n is a, c, g, or t
  misc_feature (947)..(947): n is a, c, g, or t
  misc_feature (1003)..(1003): n is a, c, g, or t
  misc_feature (1016)..(1016): n is a, c, g, or t
  misc_feature (1030)..(1030): n is a, c, g, or t
  misc_feature (1034)..(1034): n is a, c, g, or t
aatagagagattactatgagaggatcgcatcaccatcaccatcacggatcctatttaggtgacactatagaatcgtcgacccacgcgtccgggcatttagacatctttgaattccttgatttaaagaagaacacaggaaaggaagagcagcgtgccagagatcttttctttgctctttggattccggatctcttcatgaaacgagtggagactaatcaggactggtctttgatgtgtccaaatgagtgtcctggtctggatgaggtttggggagaggaatttgagaaactatatgcaagttatgagaaacaaggtcgtgtccgcaaagttgtaaaagctcagcagctttggtatgccatcattgagtctcagacggaaacaggcaccccgtatatgctctacaaagattcctgtaatcgaaagagcaaccagcagaacctgggaaccatcaaatgcagcaacctgtgcacagaaatagtggagtacaccagcaaagatgaggttgctgtttgtaatttggcttccctggccctgaatatgtatgtcacatcagaacacacatacgactttaagaagttggctgaagtcactaaagtcgttgtccgaaacttgaataaaattattgatataaactactatcctgtaccagaggcatgcctatcaaataaacgccatcgccccattggaattggggtacaaggtctggcagatgcttttatcctgatgagatacccttttgagagtgcagaagcccagttactgaataagcagatctttgaaactatttattatggtgctctggaagccagctgtgaccttgccaaggagcagggcccatacgaaacctatgagggctctccagttagcaaaggaattcttcagtatgatatgtggaatgttactcctacagacctatgggactgggaaggtnctcaaggagaaaaatngccaaagtatggtaaaaaaaacagtttacttattgccccgatgcctacagcttccnctgctccaaatcntggggaaaaatgantccn

SEQ ID NO: 183 - DNA, 1179 bp, Homo Sapiens
  misc_feature (890)..(890): n is a, c, g, or t
  misc_feature (911)..(911): n is a, c, g, or t
  misc_feature (914)..(914): n is a, c, g, or t
  misc_feature (966)..(966): n is a, c, g, or t
  misc_feature (969)..(969): n is a, c, g, or t
  misc_feature (973)..(973): n is a, c, g, or t
  misc_feature (992)..(992): n is a, c, g, or t
  misc_feature (998)..(998): n is a, c, g, or t
  misc_feature (1005)..(1005): n is a, c, g, or t
  misc_feature (1018)..(1018): n is a, c, g, or t
  misc_feature (1023)..(1023): n is a, c, g, or t
  misc_feature (1058)..(1058): n is a, c, g, or t
  misc_feature (1063)..(1063): n is a, c, g, or t
  misc_feature (1078)..(1078): n is a, c, g, or t
  misc_feature (1095)..(1095): n is a, c, g, or t
  misc_feature (1102)..(1102): n is a, c, g, or t
  misc_feature (1105)..(1105): n is a, c, g, or t
  misc_feature (1107)..(1108): n is a, c, g, or t
  misc_feature (1121)..(1121): n is a, c, g, or t
  misc_feature (1135)..(1135): n is a, c, g, or t
  misc_feature (1139)..(1139): n is a, c, g, or t
  misc_feature (1145)..(1145): n is a, c, g, or t
  misc_feature (1156)..(1156): n is a, c, g, or t
  misc_feature (1166)..(1166): n is a, c, g, or t
  misc_feature (1175)..(1175): n is a, c, g, or t
  misc_feature (1178)..(1178): n is a, c, g, or t
ttagagaaattactatgagaggatcgcatcaccatcaccatcacggatcctatttaggtgacactatagaatcgtcgacccacgcgtccggacagctgaccatggaagcgaatgggttgggacctcagggttttccggagctgaagaatgacacattcctgcgagcagcctggggagaggaaacagactacactcccgtttggtgcatgcgccaggcaggccgttacttaccagagtttagggaaacccgggctgcccaggactttttcagcacgtgtcgctctcctgaggcctgctgtgaactgactctgcagccactgcgtcgcttccctctggatgctgccatcattttctccgacatccttgttgtaccccaggcactgggcatggaggtgaccatggtacctggcaaaggacccagcttcccagagccattaagagaagagcaggacctagaacgcctacgggatccagaagtggtagcctctgagctaggctatgtgttccaagccatcacccttacccgacaacgactggctggacgtgtgccgctgattggctttgctggtgccccatggaccctgatgacatacatggttgagggtggtggctcaagcaccatggctcaggccaagcgctggctctatcagagacctcaggctagtcaccagctgcttcgcatcctcactgatgctctggtcccatatctggtaggacaagtggtggctggtgcccaggcattgcagctgtttgagtcccatgcagggcatcttggcccacagctcttcaacaagtttgcactgccttacatccgtgatgtggccaagcaagtgaaggccaggttgcgggaggcaggcctggcaccagtgcccatgatcatctttgctaangatgggcattttgccctgganganctggcccaagctggctatgaggtggttgggcttgactgggacagtggccccnaanaaanccccgggagtgtgtggggnaaaaanggtgacnttgcagggcaacntggancccctgtgccttgtatgcatctgaagaagaaatcnggcanttggggaaaccaaangctggatgaatttgganccaatcnctnanntgccaacctgggncatgggctttttcntganatgganccaaaaaatgngggccccttngggaaggcnggna

SEQ ID NO: 184 - DNA, 1158 bp, Homo Sapiens
  misc_feature (782)..(782): n is a, c, g, or t
  misc_feature (825)..(825): n is a, c, g, or t
  misc_feature (890)..(890): n is a, c, g, or t
  misc_feature (896)..(896): n is a, c, g, or t
  misc_feature (907)..(907): n is a, c, g, or t
  misc_feature (912)..(912): n is a, c, g, or t
  misc_feature (949)..(949): n is a, c, g, or t
  misc_feature (955)..(955): n is a, c, g, or t
  misc_feature (965)..(965): n is a, c, g, or t
  misc_feature (969)..(969): n is a, c, g, or t
  misc_feature (973)..(974): n is a, c, g, or t
  misc_feature (979)..(979): n is a, c, g, or t
  misc_feature (981)..(981): n is a, c, g, or t
  misc_feature (997)..(997): n is a, c, g, or t
  misc_feature (1029)..(1029): n is a, c, g, or t
  misc_feature (1048)..(1048): n is a, c, g, or t
  misc_feature (1052)..(1052): n is a, c, g, or t
  misc_feature (1055)..(1055): n is a, c, g, or t
  misc_feature (1060)..(1060): n is a, c, g, or t
  misc_feature (1070)..(1070): n is a, c, g, or t
  misc_feature (1081)..(1081): n is a, c, g, or t
  misc_feature (1091)..(1091): n is a, c, g, or t
  misc_feature (1100)..(1100): n is a, c, g, or t
  misc_feature (1102)..(1102): n is a, c, g, or t
  misc_feature (1106)..(1106): n is a, c, g, or t
  misc_feature (1110)..(1110): n is a, c, g, or t
  misc_feature (1112)..(1112): n is a, c, g, or t
  misc_feature (1117)..(1117): n is a, c, g, or t
  misc_feature (1119)..(1119): n is a, c, g, or t
  misc_feature (1129)..(1129): n is a, c, g, or t
  misc_feature (1137)..(1137): n is a, c, g, or t
  misc_feature (1140)..(1140): n is a, c, g, or t
  misc_feature (1145)..(1145): n is a, c, g, or t
  misc_feature (1155)..(1156): n is a, c, g, or t
  misc_feature (1158)..(1158): n is a, c, g, or t
agagaaattactatgagaggatcgcatcaccatcaccatcacggatcctatttaggtgacactatagaatcgtcgacccacgcgtccggccaagcaagaggagttcttcaacctgtcccactgccaactggtgaccctcatcagccgggacgacctgaacgtgcgctgcgagtccgaggtcttccacgcctgcatcaactgggtcaagtacgactgcgaacagcgacggttctacgtccaggcgctgctgcgggccgtgcgctgccactcgttgacgccgaacttcctgcagatgcagctgcagaagtgcgagatcctgcagtccgactcccgctgcaaggactacctggtcaagatcttcgaggagctcaccctgcacaagcccacgcaggtgatgccctgccgggcgcccaaggtgggccgcctgatctacaccgcgggcggctacttccgacagtcgctcagctacctggaggcttacaaccccagtgacggcacctggctccggttggcggacctgcaggtgccgcggagcggcctggccggctgcgtggtgggcgggctgttgtacgccgtgggcggcaggaacaactcgcccgacggcaacaccgactccagcgccctggactgttacaaccccatgaccaatcagtggtcgccctgcgcccccatgagcgtgccccgtaaccgcatcggggtgggggtcatcgatggccacatctatgccgtcggcggctcccacggctgcatccaccacaacagtgtggagaggtatgagccanagcgggatgagtggcacttggtggccccaatgctgacacgaangatcggggtgggcgtggctgtcctcaatcgtctccttttatgccgtgggggggctttgacggganaaaccnccttaattcanctgantgttactacccaaaaaggaacgagtggcgaatgatcncagcantgaacaccantccnaaannggggnangggtctgcgtcctggnaaaatgtatttatgctgctggggggctatgantggtcaggaacaactgaanagcntgnaacgntacaatgggnaaaaaaaaaantggaattttntaacccccntnaaanaccngnaaaangncctggggatnccttgtcnccnagggnaaaatttacnncn

SEQ ID NO: 185 - DNA, 1229 bp, Homo Sapiens
  misc_feature (677)..(677): n is a, c, g, or t
  misc_feature (782)..(782): n is a, c, g, or t
  misc_feature (811)..(811): n is a, c, g, or t
  misc_feature (839)..(839): n is a, c, g, or t
  misc_feature (845)..(845): n is a, c, g, or t
  misc_feature (849)..(849): n is a, c, g, or t
  misc_feature (870)..(870): n is a, c, g, or t
  misc_feature (878)..(878): n is a, c, g, or t
  misc_feature (883)..(883): n is a, c, g, or t
  misc_feature (910)..(910): n is a, c, g, or t
  misc_feature (913)..(913): n is a, c, g, or t
  misc_feature (917)..(917): n is a, c, g, or t
  misc_feature (919)..(919): n is a, c, g, or t
  misc_feature (953)..(953): n is a, c, g, or t
  misc_feature (978)..(978): n is a, c, g, or t
  misc_feature (994)..(994): n is a, c, g, or t
  misc_feature (1000)..(1000): n is a, c, g, or t
  misc_feature (1011)..(1011): n is a, c, g, or t
  misc_feature (1014)..(1014): n is a, c, g, or t
  misc_feature (1017)..(1017): n is a, c, g, or t
  misc_feature (1024)..(1025): n is a, c, g, or t
  misc_feature (1027)..(1027): n is a, c, g, or t
  misc_feature (1033)..(1033): n is a, c, g, or t
  misc_feature (1050)..(1052): n is a, c, g, or t
  misc_feature (1069)..(1069): n is a, c, g, or t
  misc_feature (1077)..(1078): n is a, c, g, or t
  misc_feature (1091)..(1092): n is a, c, g, or t
  misc_feature (1096)..(1096): n is a, c, g, or t
  misc_feature (1110)..(1110): n is a, c, g, or t
  misc_feature (1119)..(1119): n is a, c, g, or t
  misc_feature (1129)..(1129): n is a, c, g, or t
  misc_feature (1131)..(1131): n is a, c, g, or t
  misc_feature (1134)..(1135): n is a, c, g, or t
  misc_feature (1138)..(1138): n is a, c, g, or t
  misc_feature (1154)..(1154): n is a, c, g, or t
  misc_feature (1156)..(1156): n is a, c, g, or t
  misc_feature (1158)..(1158): n is a, c, g, or t
  misc_feature (1172)..(1172): n is a, c, g, or t
  misc_feature (1199)..(1200): n is a, c, g, or t
  misc_feature (1204)..(1204): n is a, c, g, or t
  misc_feature (1222)..(1222): n is a, c, g, or t
  misc_feature (1226)..(1227): n is a, c, g, or t
atagagaaattactatgagaggatcgcatcaccatcaccatcacggatcctatttaggtgacactatagaatcgtcgacccacgcgtccggctgtggaagccaggcgcacaggatgcaagcagccaggcccagggaggcagcagctgcatcctcagagaggaagccaggatgccccactctgctgggggtactgcaggggtggggctggaggctgcagagcccacagccctgctcaccagggcagagcccccttcagaacccacagagatccgtccacaaaagcggaaaaaggggccagcccccaaaatgctggggaacgagctatgcagcgtgtgtggggacaaggcctcgggcttccactacaatgttctgagctgcgagggctgcaagggattcttccgccgcagcgtcatcaagggagcgcactacatctgccacagtggcggccactgccccatggacacctacatgcgtcgcaagtgccaggagtgtcggcttcgcaaatgccgtcaggctggcatgcgggaggagtgtgtcctgtcagaagaacagatccgcctgaagaaactgaagcggcaagaggaggaacaggctcatgccacatccttgccccccagggcttcctcacccccccaaatcctgccccagctcagcccggaacaactgggcatgatcnagaagctcgtcgctgcccagcaacagtgtaaccggcgctccttttctgaccggcttcgagtcacgccttggcccatggcaccagatccccatagccgggaggccngtcagcagcgctttgcccacttcactganctggccatcgtctctgtgcaggaaatantttgantttnctaaaaagctacccggctttntgcaactnaaccnggaagaacaaaattgcccctgcttaanaantctncnattcaaggtggctggaaaaaggcaagggattaanggaaaaacaaaatgggaattttttntggggaggggccttcnaaaatncaagcttgggnaanccnaaatttnntnggaaancaaggaataaaaaaaannngccctcctttaaaaaangcattttnncaaaaaaaacccnnctanttccccttttaaanttttcctcnttttttccangnaannttntgaaaaatttccgaanananaaccttgggaatanaaattaccctttctaaggatttttttnnaccnggaaaaattttcaaaaangttnntt

SEQ ID NO: 186 - DNA, 1222 bp, Homo Sapiens
  misc_feature (2)..(2): n is a, c, g, or t
  misc_feature (820)..(820): n is a, c, g, or t
  misc_feature (844)..(844): n is a, c, g, or t
  misc_feature (851)..(851): n is a, c, g, or t
  misc_feature (853)..(853): n is a, c, g, or t
  misc_feature (866)..(866): n is a, c, g, or t
  misc_feature (895)..(898): n is a, c, g, or t
  misc_feature (932)..(932): n is a, c, g, or t
  misc_feature (960)..(960): n is a, c, g, or t
  misc_feature (988)..(989): n is a, c, g, or t
  misc_feature (999)..(999): n is a, c, g, or t
  misc_feature (1019)..(1019): n is a, c, g, or t
  misc_feature (1025)..(1025): n is a, c, g, or t
  misc_feature (1029)..(1029): n is a, c, g, or t
  misc_feature (1032)..(1032): n is a, c, g, or t
  misc_feature (1051)..(1051): n is a, c, g, or t
  misc_feature (1059)..(1059): n is a, c, g, or t
  misc_feature (1063)..(1063): n is a, c, g, or t
  misc_feature (1069)..(1069): n is a, c, g, or t
  misc_feature (1071)..(1071): n is a, c, g, or t
  misc_feature (1077)..(1077): n is a, c, g, or t
  misc_feature (1080)..(1080): n is a, c, g, or t
  misc_feature (1083)..(1083): n is a, c, g, or t
  misc_feature (1089)..(1089): n is a, c, g, or t
  misc_feature (1103)..(1103): n is a, c, g, or t
  misc_feature (1110)..(1110): n is a, c, g, or t
  misc_feature (1120)..(1121): n is a, c, g, or t
  misc_feature (1134)..(1134): n is a, c, g, or t
  misc_feature (1136)..(1138): n is a, c, g, or t
  misc_feature (1146)..(1146): n is a, c, g, or t
  misc_feature (1161)..(1162): n is a, c, g, or t
  misc_feature (1171)..(1172): n is a, c, g, or t
  misc_feature (1192)..(1192): n is a, c, g, or t
  misc_feature (1199)..(1199): n is a, c, g, or t
  misc_feature (1201)..(1201): n is a, c, g, or t
  misc_feature (1203)..(1203): n is a, c, g, or t
  misc_feature (1213)..(1213): n is a, c, g, or t
  misc_feature (1218)..(1218): n is a, c, g, or t
antagagaaattactatgagaggatcgcatcaccatcaccatcacggatcctatttaggtgacactatagaatcgtcgacccacgcgtccgggcaccagctgcggggcaagatggaggcgctgattttggaaccttccctgtatactgtcaaagccatcctgattctggacaatgatggagatcgactttttgccaagtactatgacgacacctaccccagtgtcaaggagcaaaaggcctttgagaagaacattttcaacaagacccatcggactgacagtgaaattgccctcttggaaggcctgacagtggtatacaaaagcagtatagatctctatttctatgtgattggcagctcctatgaaaatgagctgatgcttatggctgttctgaactgtctcttcgactcattgagccagatgctgaggaaaaatgtagaaaagcgagcactgctggagaacatggaggggctgttcttggctgtggatgaaattgtagatggaggggtgatcctagagagtgatccccagcaggtggtacaccgggtggcattaaggggtgaagatgtcccccttacggagcagaccgtgtctcaggtgctgcagtcagccaaagaacagatcaagtggtcactccttcggtgaagacctcactgttcctggctcttcatcctcttcaaaaaatttgcatgtctgctgtgaattttcatctagttccccaatcgatgctctcagggtcatctcgggggatcacagggatccttaaaatctccattctgtttgtgggttgccccctcaacctcccctacaccccttcccnattctttttcattcttcttgcagntcctggnantaaaagctcccanccatattttaaataatagggcaggggaannnnccctctttcctttcctaaactggaattatgctcncatgctccccttgccctgacatttttgnaaattccggtgcccctttgctggaaccnnccctttcaanttaaaataagaaaaaaaaantgggcngaanggntttccctcccctttgcctncacctggncccncctccnanaacccnaanaangggaanaaaaaaaaaaattntttttcntaaaacaaanngggggcgggaaangnnnagaatttntccaatcaaaccccnnacccccctnnaggaccccgggttttttccnttccttntnangcccggcccntcctnggaa

SEQ ID NO: 187 - DNA, 1046 bp, Homo Sapiens
  misc_feature (885)..(885): n is a, c, g, or t
  misc_feature (890)..(890): n is a, c, g, or t
  misc_feature (898)..(898): n is a, c, g, or t
  misc_feature (926)..(926): n is a, c, g, or t
  misc_feature (931)..(931): n is a, c, g, or t
  misc_feature (958)..(958): n is a, c, g, or t
  misc_feature (986)..(986): n is a, c, g, or t
  misc_feature (996)..(997): n is a, c, g, or t
  misc_feature (1002)..(1002): n is a, c, g, or t
  misc_feature (1006)..(1006): n is a, c, g, or t
  misc_feature (1008)..(1008): n is a, c, g, or t
  misc_feature (1015)..(1015): n is a, c, g, or t
  misc_feature (1020)..(1020): n is a, c, g, or t
  misc_feature (1023)..(1023): n is a, c, g, or t
  misc_feature (1029)..(1030): n is a, c, g, or t
  misc_feature (1036)..(1037): n is a, c, g, or t
  misc_feature (1043)..(1043): n is a, c, g, or t
agagagattactatgagaggatcgcatcaccatcaccatcacggatcctatttaggtgacactatagaatcgtcgacccacgcgtccgcggacgcgtgggggctctcacgtacttattcttcccacgtttcctggattacaggccaggccatggagataggcagcgcagccctgactatactggtagaatgctgggatgggcacctgacaccccctgaggttgcatccctggctgacagggcatcacgggcaagagactccaatatggtgagggcggcagcagagctggccctgagctgcctgcctcacgcccatgcattgaaccctaatgagatccagcgggccctggtgcagtgcaaggaacaggacaacctgatgttggagaaggcctgcatggcagtggaagaggcagctaagggtgggggcgtgtaccctgaagtgttgtttgaggttgctcaccagtggttctggctgtatgagcaaactgcaggtggctcatccacagcccgtgaaggggctacaagctgtagtgccagtgggatcagggcaggtggggaagctgggcggggtatgcctgagggtagagggggcccagggactgagccggttacagtggcagcggcagcagtgacagcagcagccacagtggtgcccgtcatatcggtggggtctagtttatacccgggtccaggactggggcatggccactcccctggcctgcacccctacactgctctacagccccacctgccctgtagccctcagtatctcactcacccagctcaccctgcccaccccatgcctcacatgccccggcctgccgtcttccctgtgcccagctctgcatacccacagggtgtgcatcctgcattcctaagggctcantaccnttattcantgactcctccctcacttgctgccactgntgtgnctttccccgttccttccatggcacccntcaaagtaaatccctaccaacaaaaccngggcttccanngcccnccangnggccttnaacantgncatccnnaatccnntttccncca

SEQ ID NO: 188 - DNA, 1100 bp, Homo Sapiens
  misc_feature (911)..(911): n is a, c, g, or t
  misc_feature (917)..(917): n is a, c, g, or t
  misc_feature (919)..(919): n is a, c, g, or t
  misc_feature (936)..(936): n is a, c, g, or t
  misc_feature (942)..(942): n is a, c, g, or t
  misc_feature (957)..(957): n is a, c, g, or t
  misc_feature (964)..(964): n is a, c, g, or t
  misc_feature (966)..(966): n is a, c, g, or t
  misc_feature (983)..(984): n is a, c, g, or t
  misc_feature (1003)..(1003): n is a, c, g, or t
  misc_feature (1008)..(1008): n is a, c, g, or t
  misc_feature (1010)..(1010): n is a, c, g, or t
  misc_feature (1012)..(1012): n is a, c, g, or t
  misc_feature (1020)..(1020): n is a, c, g, or t
  misc_feature (1022)..(1022): n is a, c, g, or t
  misc_feature (1031)..(1031): n is a, c, g, or t
  misc_feature (1035)..(1035): n is a, c, g, or t
  misc_feature (1043)..(1043): n is a, c, g, or t
  misc_feature (1046)..(1046): n is a, c, g, or t
  misc_feature (1048)..(1048): n is a, c, g, or t
  misc_feature (1052)..(1052): n is a, c, g, or t
  misc_feature (1055)..(1055): n is a, c, g, or t
  misc_feature (1060)..(1060): n is a, c, g, or t
  misc_feature (1070)..(1071): n is a, c, g, or t
  misc_feature (1076)..(1077): n is a, c, g, or t
  misc_feature (1098)..(1098): n is a, c, g, or t
agagaaattactatgagaggatcgcatcaccatcaccatcacggatcctatttaggtgacactatagaatcgtcgacccacgcgtccgcggacgcgtgggcgcccgcgcgggcgcaggcggccgggatggcggggcccggctggggtcccccgcgcctggacggcttcatcctcaccgagcgcctgggcagcggcacgtacgccacggtgtacaaggcctacgccaagaaggacactcgtgaagtggtagccataaagtgtgtagccaagaaaagtctgaacaaggcatcggtggagaacctcctcacggagattgagatcctcaagggcattcgacatccccacattgtgcagctgaaagactttcagtgggacagtgacaatatctacctcatcatggagttttgcgcagggggcgacctgtctcgcttcatccatacccgcaggattctgcctgagaaggtggcgcgtgtcttcatgcagcaattagctagcgccctgcaattcctgcatgaacggaatatctctcacctggatctgaagccacagaacattctactgagctccttggagaagccccacctaaaactggcagactttggtttcgcacaacacatgtccccgtgggatgagaagcacgtgctccgtggctcccccctctacatggcccccgagatggtgtgccagcggcagtatgacgcccgcgtggacctctggtccatgggggtcatcctgtatggtgagacctcttttccctgcttctcaccctgaggcctacagtttcctcaggcaaggcctctctgggccacttctgaagggttctgatgaaaactgactgctggcccagggcccctgctgaggggcgtcaggccaggcttgacccattcctcccagcctcggctctgcctccnttccananaagccctcttcgggcancccccntttgcctccaggtcnttctcgnanctggaaaaaaaaatccnnaacaaccgggtcatcaagntcccntngnggccctgntntcccgaaantgcnggaactantgnancggntcntgganggggaacccnnccttnnatttctttcaagaattttttncc

SEQ ID NO: 189 - DNA, 1277 bp, Homo Sapiens
  misc_feature (1)..(2): n is a, c, g, or t
  misc_feature (832)..(832): n is a, c, g, or t
  misc_feature (906)..(906): n is a, c, g, or t
  misc_feature (932)..(932): n is a, c, g, or t
  misc_feature (938)..(938): n is a, c, g, or t
  misc_feature (968)..(968): n is a, c, g, or t
  misc_feature (971)..(971): n is a, c, g, or t
  misc_feature (995)..(996): n is a, c, g, or t
  misc_feature (1000)..(1000): n is a, c, g, or t
  misc_feature (1004)..(1004): n is a, c, g, or t
  misc_feature (1006)..(1006): n is a, c, g, or t
  misc_feature (1008)..(1008): n is a, c, g, or t
  misc_feature (1032)..(1032): n is a, c, g, or t
  misc_feature (1038)..(1039): n is a, c, g, or t
  misc_feature (1044)..(1044): n is a, c, g, or t
  misc_feature (1057)..(1057): n is a, c, g, or t
  misc_feature (1074)..(1076): n is a, c, g, or t
  misc_feature (1082)..(1082): n is a, c, g, or t
  misc_feature (1089)..(1089): n is a, c, g, or t
  misc_feature (1095)..(1095): n is a, c, g, or t
  misc_feature (1118)..(1119): n is a, c, g, or t
  misc_feature (1122)..(1122): n is a, c, g, or t
  misc_feature (1132)..(1132): n is a, c, g, or t
  misc_feature (1134)..(1134): n is a, c, g, or t
  misc_feature (1144)..(1144): n is a, c, g, or t
  misc_feature (1154)..(1154): n is a, c, g, or t
  misc_feature (1156)..(1156): n is a, c, g, or t
  misc_feature (1164)..(1164): n is a, c, g, or t
  misc_feature (1175)..(1175): n is a, c, g, or t
  misc_feature (1178)..(1179): n is a, c, g, or t
  misc_feature (1181)..(1181): n is a, c, g, or t
  misc_feature (1191)..(1191): n is a, c, g, or t
  misc_feature (1193)..(1193): n is a, c, g, or t
  misc_feature (1203)..(1203): n is a, c, g, or t
  misc_feature (1214)..(1214): n is a, c, g, or t
  misc_feature (1220)..(1220): n is a, c, g, or t
  misc_feature (1227)..(1227): n is a, c, g, or t
  misc_feature (1233)..(1233): n is a, c, g, or t
  misc_feature (1243)..(1243): n is a, c, g, or t
  misc_feature (1245)..(1245): n is a, c, g, or t
  misc_feature (1251)..(1251): n is a, c, g, or t
  misc_feature (1259)..(1259): n is a, c, g, or t
  misc_feature (1273)..(1274): n is a, c, g, or t
nnattagagaaattactatgagaggatcgcatcaccatcaccatcacggatcctatttaggtgacactatagaatcgtcgacccacgcgtccggtggattcagcgcgatgcccaaatccaagcgcgacaagaaagtctccttaaccaaaactgccaagaaaggcttggaattgaaacaaaacctgatagaagagcttcggaaatgtgtggacacctacaagtaccttttcatcttctctgtggccaacatgaggaacagcaagctgaaggacatccggaacgcctggaagcacagccggatgttctttggcaaaaacaaggtgatgatggtggccttgggtcggagcccatctgatgaatacaaagacaacctgcaccaggtcagcaaaaggttgaggggtgaggtgggtctcctgttcaccaaccgcacaaaggaggaggtgaatgagtggttcacgaaatacacagaaatggactacgcccgagctggtaacaaagcagctttcactgtgagcctggatccagggcccctggagcagttcccccactccatggagccacagctcaggcagctgggcctgcccaccgccctcaagagaggtgtggtgactctgctgtctgactacgaggtgtgcaaggagggcgatgtgctgaccccagagcaggctcgcgtcctgaagctttttgggtatgagatggctgaattcaaggtgaccatcaaatacatgtgggattcacagtcgggaaggttccagcagatgggagacgacttgccagaaagcgcatctgagtccacagaagagtcagactcagaagatgatgactgaaaggnactcgggactgaaggtctcctggaagcttctgggtctcactggaccatcaggactgctgccgccccctctgganagagcagctttttattttgtctgtanacaggnaacatgatgggcactgacctcctgtaaaanaanaaaaactgtgggcccgggcgcggnnggcncccncntngaattccccccacttttgggaaanccaagnngggcnaaatccttaaggncaggaaaattgaaaccnnncttggncttaacnccgggnaaaaccccccttcctccttaaanntanaaaaaaaaantnatttgggccnaagggccttngnccctgtanccccgcttccncgnnanggtgaaggcngnaaattccttnaaccccggaangggaantttcccntaattnaaatgaaccntnttcccnccccgggnaaaaaaaaaactcnnccc

SEQ ID NO: 190 - DNA, 1217 bp, Homo Sapiens
  misc_feature (927)..(927): n is a, c, g, or t
  misc_feature (1011)..(1011): n is a, c, g, or t
  misc_feature (1020)..(1020): n is a, c, g, or t
  misc_feature (1038)..(1038): n is a, c, g, or t
  misc_feature (1041)..(1041): n is a, c, g, or t
  misc_feature (1047)..(1047): n is a, c, g, or t
  misc_feature (1055)..(1055): n is a, c, g, or t
  misc_feature (1059)..(1059): n is a, c, g, or t
  misc_feature (1071)..(1071): n is a, c, g, or t
  misc_feature (1073)..(1073): n is a, c, g, or t
  misc_feature (1079)..(1079): n is a, c, g, or t
  misc_feature (1096)..(1097): n is a, c, g, or t
  misc_feature (1116)..(1116): n is a, c, g, or t
  misc_feature (1119)..(1119): n is a, c, g, or t
  misc_feature (1132)..(1132): n is a, c, g, or t
  misc_feature (1137)..(1137): n is a, c, g, or t
  misc_feature (1145)..(1146): n is a, c, g, or t
  misc_feature (1157)..(1158): n is a, c, g, or t
  misc_feature (1163)..(1163): n is a, c, g, or t
  misc_feature (1170)..(1170): n is a, c, g, or t
  misc_feature (1175)..(1175): n is a, c, g, or t
  misc_feature (1192)..(1193): n is a, c, g, or t
  misc_feature (1198)..(1199): n is a, c, g, or t
  misc_feature (1202)..(1203): n is a, c, g, or t
  misc_feature (1205)..(1207): n is a, c, g, or t
  misc_feature (1210)..(1210): n is a, c, g, or t
  misc_feature (1214)..(1214): n is a, c, g, or t
gaatagagaaattactatgagaggatcgcatcaccatcaccatcacggatcctatttaggtgacactatagaatcgtcgacccacgcgtccggccgcgcgctgtgtctccgctgcgtccgccgaggcccccgagtgtcagggacaaaagcctccgcctgctcccgcagccggggctcatctgccgccgccgccgcgctgaggagagttcgccgccgtcgccgcccgtgaggatctgagagccatgtcggccagcagcctcttggagcagagaccaaaaggtcaaggaaacaaagtacaaaatggatctgtacatcaaaaggatggattaaacgatgatgattttgaaccttacttgagtccacaggcaaggcccaataatgcatatactgccatgtcagattcctacttacccagttactacagtccctccattggcttctcctattctttgggtgaagctgcttggtctacggggggtgacacagccatgccctacttaacttcttatggacagctgagcaacggagagccccacttcctaccagatgcaatgtttgggcaaccaggagccctaggtagcactccatttcttggtcagcatggttttaatttctttcccagtgggattgacttctcagcatggggaaataacagttctcagggacagtctactcagagctctggatatagtagcaattatgcttatgcacctagctccttaggtggagccatgattgatggacagtcagcttttgccaatgagaccctcaataaggctcctggcatgaatactatagaccaagggatggcagcactgaagttgggtagcacagaagttgcaagcaatgttccaaaagttgtaggttctgctgttggtagcgggtccattactagtaacatcgtggcttccaatagtttgcctccanccaccattgctcctccaaaaccagcatcttggggctgatattgctagcaagcctgcaaaacagcaacttaaactgaaaaccaanaatggcatngcagggtcaagtcttccnccncccccnataaagcntaanatggaaattggnanttgggnaaaaaagggtcccgttnncaaaacccccctcaagggnttnggttcaaaaaaangtcanccaacccnngggttccctcnncctgnaggtcancaggntaaaaaaacccccccannggttnnggnntnnntangggnaaa

SEQ ID NO: 191 - DNA, 1260 bp, Homo Sapiens
  misc_feature (992)..(992): n is a, c, g, or t
  misc_feature (1007)..(1007): n is a, c, g, or t
  misc_feature (1015)..(1015): n is a, c, g, or t
  misc_feature (1037)..(1037): n is a, c, g, or t
  misc_feature (1041)..(1041): n is a, c, g, or t
  misc_feature (1045)..(1045): n is a, c, g, or t
  misc_feature (1056)..(1056): n is a, c, g, or t
  misc_feature (1078)..(1078): n is a, c, g, or t
  misc_feature (1082)..(1082): n is a, c, g, or t
  misc_feature (1085)..(1085): n is a, c, g, or t
  misc_feature (1088)..(1088): n is a, c, g, or t
  misc_feature (1095)..(1095): n is a, c, g, or t
  misc_feature (1097)..(1097): n is a, c, g, or t
  misc_feature (1104)..(1104): n is a, c, g, or t
  misc_feature (1106)..(1106): n is a, c, g, or t
  misc_feature (1123)..(1123): n is a, c, g, or t
  misc_feature (1134)..(1134): n is a, c, g, or t
  misc_feature (1140)..(1140): n is a, c, g, or t
  misc_feature (1142)..(1142): n is a, c, g, or t
  misc_feature (1154)..(1154): n is a, c, g, or t
  misc_feature (1160)..(1160): n is a, c, g, or t
  misc_feature (1163)..(1163): n is a, c, g, or t
  misc_feature (1166)..(1166): n is a, c, g, or t
  misc_feature (1172)..(1172): n is a, c, g, or t
  misc_feature (1177)..(1177): n is a, c, g, or t
  misc_feature (1183)..(1183): n is a, c, g, or t
  misc_feature (1190)..(1190): n is a, c, g, or t
  misc_feature (1194)..(1194): n is a, c, g, or t
  misc_feature (1209)..(1209): n is a, c, g, or t
  misc_feature (1212)..(1212): n is a, c, g, or t
  misc_feature (1216)..(1216): n is a, c, g, or t
  misc_feature (1219)..(1219): n is a, c, g, or t
  misc_feature (1228)..(1229): n is a, c, g, or t
  misc_feature (1233)..(1233): n is a, c, g, or t
  misc_feature (1250)..(1250): n is a, c, g, or t
  misc_feature (1255)..(1255): n is a, c, g, or t
  misc_feature (1260)..(1260): n is a, c, g, or t
agaaattactatgagaggatcgcatcaccatcaccatcacggatcctatttaggtgacactatagaatcgtcgacccacgcgtccgggatatctgtggaccttatggaagcaaagactcttggaactgtaacgcccagaaaacctgtcttatctgtcagtgcaagaaaaattaaggacaatgcggctgattggcacaatttaatcctgaagtgggaaaccctcaatgatgcaggttttaccactgcaaataatattgccaacttgaaaatcagtttattgaataaagacaagatagaactagacagcagcagcccagcctcgaaggaaaatgaagaaaaggtgtgtctggaatataacgaggaactggagaagctgtgtgaggaactgcaggccaccttggatgggttgaccaaaatacaggtgaaaatggaaaagctgtcttcaactaccaagggaatttgtgaactagaaaactaccattatggggaggagagtaaacgaccccctctgttccacacgtggcctacaacccatttctatgaggtttcgcataagctcttggagatgtacaggaaggagctgctcctgaagcacacggtggccaaggagcttgcccacaccggggatcccgacctcaccctgagctacctgtccatgtggctgcaccagccctatgtggagagcgacagcaggctgcatctggagagcatgctgctggagacaggccaccgagctctctgacgtcctgagacggctgcggacactggctccttccacgtctcaccaggcagacagtctgcctaggacccagtgccgcaggcctggatcagaccccaggatcagaccttcttggggtcttctggccagagcttgtcaccagccccatgggcctctccaggcgtgctcatgcccacaacccgcggccagccccacgtggtgccgctcagccttctctgccctcctgggaatctgtcattcgtgggtgcttcanagtaaaatcaatgantttctgancaaatgaaatcccaggagggcncccntggnggtttatgggnactctggactcctgaaaaccgncctngantcnacaggananatctacngncctgactggaccccccnaactcccaggnaccccngnttgttcccctgntggccnttnccncccgcnaaaancccccnttttttncccnccccccgggcttttnaancaanggngggaaaaanncccncccccctaaagggggtnggaanggggn

SEQ ID NO: 192 - DNA, 749 bp, Homo Sapiens
  misc_feature (717)..(718): n is a, c, g, or t
  misc_feature (728)..(730): n is a, c, g, or t
  misc_feature (733)..(742): n is a, c, g, or t
  misc_feature (744)..(749): n is a, c, g, or t
agaaattaactatgagaggatcgcatcaccatcaccatcacggatcctatttaggtgacactatagaatcgtcgacccacgcgtccggctgttttctaatcacgtggctgccacccaggcctctctgctcctgtcttttgtttggatgccggcgctgctgcctgtggcctcccgccttttgttgctaccccgagtcttgctgaccatggcctctggaagccctccgacccagccctcgccggcctcggattccggctctggctacgttccgggctcggtctctgcagcctttgttacttgccccaacgagaaggtcgccaaggagatcgccagggccgtggtggagaagcgcctagcagcctgcgtcaacctcatccctcagattacatccatctatgagtggaaagggaagatcgaggaagacagtgaggtgctgatgatgattaaaacccaaagttccttggtcccagctttgacagattttgttcgttctgtgcacccttacgaagtggccgaggtaattgcattgcctgtggaacaggggaactttccgtacctgcagtgggtgcgccaggtcacagagtcagtttctgactctatcacagtcctgccatgatgagccctgttcctgctcatcatgaagatccccgcgatacttcaacgccttctgacttccaggtgatgactgggcccccaataaatcccgtctttgggtcnnaaaaaaaaannnaannnnnnnnnnannnnnn

SEQ ID NO: 193 - DNA, 899 bp, Homo Sapiens
  misc_feature (1)..(1): n is a, c, g, or t
  misc_feature (3)..(3): n is a, c, g, or t
  misc_feature (811)..(811): n is a, c, g, or t
  misc_feature (866)..(866): n is a, c, g, or t
  misc_feature (873)..(874): n is a, c, g, or t
  misc_feature (878)..(878): n is a, c, g, or t
  misc_feature (880)..(899): n is a, c, g, or t
nantagagaaattactatgagaggatcgcatcaccatcaccatcacggatcctatttaggtgacactatagaatcgtcgacccacgcgtccgcgctaccagctccccgctgccctgcgctcggcgcgctggcatccggcccgggggaaagcggaccagcccttctgcaggtctgcggggccaagtgtcccggcggcgcacctcgtggcgagaatcgggagaaggaggagactacaaggataggcccaggagtaatggagtccaaagagaaacgagcagtaaacagtctcagcatggaaaatgccaaccaagaaaatgaagaaaaggagcaagttgctaataaaggggagcccttggccctccctttggatgctggtgaatactgtgtgcctagaggaaatcgtaggcggttccgcgttaggcagcccatcctgcagtatagatgggatatgatgcataggcttggagaaccacaggcaaggatgagagaagagaatatggaaaggattggggaggaggtgagacagctgatggaaaagctgagggaaaagcagttgagtcatagtctgcgggcagtcagcactgacccccctcaccatgaccatcatgatgagttttgccttatgccctgaatcctgatggtttccctaaagttattacggaaacagacccctgctttcgaatttacatgttcatgatgtgcccttgttgtaaacctttacctgtcacttgtttacgtgggtctcctattaccagcttctaattgaatattgtgtttttgaaccagtctgtaagatttttgttagcagaanaattttacctattgcatggaaagatgctcattatagtgaagttaataaagcaccntttaaanngccnannnnnnnnnnnnnnnnnnnn

SEQ ID NO: 194 - DNA, 1096 bp, Homo Sapiens
  misc_feature (3)..(3): n is a, c, g, or t
  misc_feature (768)..(768): n is a, c, g, or t
  misc_feature (860)..(860): n is a, c, g, or t
  misc_feature (864)..(864): n is a, c, g, or t
  misc_feature (885)..(885): n is a, c, g, or t
  misc_feature (894)..(894): n is a, c, g, or t
  misc_feature (910)..(910): n is a, c, g, or t
  misc_feature (921)..(921): n is a, c, g, or t
  misc_feature (927)..(927): n is a, c, g, or t
  misc_feature (933)..(933): n is a, c, g, or t
  misc_feature (935)..(935): n is a, c, g, or t
  misc_feature (952)..(953): n is a, c, g, or t
  misc_feature (958)..(958): n is a, c, g, or t
  misc_feature (962)..(962): n is a, c, g, or t
  misc_feature (975)..(975): n is a, c, g, or t
  misc_feature (982)..(982): n is a, c, g, or t
  misc_feature (984)..(984): n is a, c, g, or t
  misc_feature (993)..(993): n is a, c, g, or t
  misc_feature (1007)..(1007): n is a, c, g, or t
  misc_feature (1012)..(1012): n is a, c, g, or t
  misc_feature (1019)..(1019): n is a, c, g, or t
  misc_feature (1025)..(1025): n is a, c, g, or t
  misc_feature (1030)..(1030): n is a, c, g, or t
  misc_feature (1049)..(1052): n is a, c, g, or t
  misc_feature (1055)..(1056): n is a, c, g, or t
  misc_feature (1061)..(1061): n is a, c, g, or t
  misc_feature (1065)..(1065): n is a, c, g, or t
  misc_feature (1068)..(1068): n is a, c, g, or t
  misc_feature (1078)..(1078): n is a, c, g, or t
  misc_feature (1081)..(1082): n is a, c, g, or t
  misc_feature (1086)..(1086): n is a, c, g, or t
  misc_feature (1088)..(1088): n is a, c, g, or t
cantagagagaattactatgagaggatcgcatcaccatcaccatcacggatcctatttaggtgacactatagaatcgtcgacccacgcgtccgtgatgaggaggatatccgtgttcaagtacgtctcagggtcttcagccgagaggagggcagcccagagccggaaactgaacccggtgcctggctcctaccccacacagagctgccaccctcacctgtccccaagccaccctgtgtcccagacgcagcacgccagtggtcagaagctggcctcctggccctcctgcacccccgggcacatgcccaccttgcctccgtaccagcctgcctccggcctgtgctatgtgcagaaccactttggtccaaaccccacctcctccagtgtctacccagcttctgcgggcacctccctgggcatccagccccccacgcctgtgaacagccctggcacggtgtattctggggccttgggcacaccaggggctgcaggctccaaggagtcctccagggtccccatgccctgagagaatttctagggaagtcatctcacttggccttctgaaggtcctccctaagagtctcctgacaaaagttacttattgaacacctctatgtgccaggctctgtgttgggtactttgatcaatgcccctgtttcagtctcatctgtactcacggcagccctgtggagtacggtgtactggcccagcttacagatgcagaaagcgagacgttctgccatcagataaaagtcacgtggctcttttantaacacggacaaggctcctcgccaaaggaaactcgtggcaaaaaaaggcaccagttggcagtagctgccgatgtctgtcccccagctccacnattncctccctgtggctgtgcccgngctcgtggntttcagtgtccgggtngtcctgttgtntgcccnttcagnanctcgcaacttggtgtgnnttggnggtnccaagcctggggnaatggtntnttccctggntgggggcgcccccnccccnattcctntccccnaaaanggggggggaatgggccccnnnnaanntgcancaantgnctgagggggncanntttntntgcctttt

SEQ ID NO: 195 - DNA, 970 bp, Homo Sapiens
tgagaggatcgcatcaccatcaccatcacggatcctatttaggtgacactatagaatcgtcgacccacgcgtccgcccacgcgtccggctttgtctgtccggcaagccgacggcccgctgctggcctccgtgacgcggcctcctccgcgcctcgcggcatggcgtcggaggggccgcgggagcccgaaagcgagggcatcaagttatcagcagatgtcaaaccatttgtccccagatttgccgggctcaatgtggcatggttagagtcctcagaagcatgtgtcttccccagctctgcagccacatactatccgtttgttcaggaaccaccagtgacagagcagaaaatatatactgaagacatggcctttggagcttcaacttttccacctcagtatttatcttctgagataactcttcatccatatgcctattctccttatacccttgactccacacagaatgtttactcagtgcctggctcccagtatctttataaccaacccagttgttaccgaggttttcaaacagtgaagcatcgaaatgagaacacatgccctctcccacaagaaatgaaagctctgtttaagaagaaaacctatgatgagaaaaaaacgtatgatcagcaaaagtttgacagtgaaagggctgatggaactatatcatctgagataaaatcagctagaggttcacatcatttgtccatttacgctgagaatagtttgaaatcagatggttaccataagcgaacagacaggaaatccagaatcattgcaaaaaatgtatctacctccaaacctgagtttgaatttaccacactggactttcctgaactgcaaggtgcagagaacaatatgtcagagatacagaagcacccaagtggggacctgtccactctgtctctaccgacatttctcttctagagaagtagtaaaaccagctgcagtgttatcaaagggtgaaatagtgg

SEQ ID NO: 196 - DNA, 1334 bp, Homo Sapiens
  misc_feature (904)..(904): n is a, c, g, or t
  misc_feature (906)..(906): n is a, c, g, or t
  misc_feature (933)..(933): n is a, c, g, or t
  misc_feature (942)..(942): n is a, c, g, or t
  misc_feature (944)..(944): n is a, c, g, or t
  misc_feature (984)..(984): n is a, c, g, or t
  misc_feature (986)..(986): n is a, c, g, or t
  misc_feature (1013)..(1013): n is a, c, g, or t
  misc_feature (1028)..(1028): n is a, c, g, or t
  misc_feature (1044)..(1044): n is a, c, g, or t
  misc_feature (1046)..(1046): n is a, c, g, or t
  misc_feature (1070)..(1070): n is a, c, g, or t
  misc_feature (1079)..(1080): n is a, c, g, or t
  misc_feature (1090)..(1090): n is a, c, g, or t
  misc_feature (1109)..(1109): n is a, c, g, or t
  misc_feature (1141)..(1142): n is a, c, g, or t
  misc_feature (1146)..(1146): n is a, c, g, or t
  misc_feature (1158)..(1158): n is a, c, g, or t
  misc_feature (1166)..(1166): n is a, c, g, or t
  misc_feature (1174)..(1174): n is a, c, g, or t
  misc_feature (1187)..(1187): n is a, c, g, or t
  misc_feature (1191)..(1191): n is a, c, g, or t
  misc_feature (1203)..(1203): n is a, c, g, or t
  misc_feature (1207)..(1208): n is a, c, g, or t
  misc_feature (1211)..(1211): n is a, c, g, or t
  misc_feature (1218)..(1218): n is a, c, g, or t
  misc_feature (1224)..(1225): n is a, c, g, or t
  misc_feature (1228)..(1228): n is a, c, g, or t
  misc_feature (1230)..(1230): n is a, c, g, or t
  misc_feature (1237)..(1237): n is a, c, g, or t
  misc_feature (1249)..(1249): n is a, c, g, or t
  misc_feature (1259)..(1260): n is a, c, g, or t
  misc_feature (1272)..(1273): n is a, c, g, or t
  misc_feature (1277)..(1278): n is a, c, g, or t
  misc_feature (1287)..(1287): n is a, c, g, or t
  misc_feature (1290)..(1290): n is a, c, g, or t
  misc_feature (1321)..(1321): n is a, c, g, or t
  misc_feature (1332)..(1332): n is a, c, g, or t
tagagaaattactatgagaggatcgcatcaccatcaccatcacggatcctatttaggtgacactatagaatcgtcgacccacgcgtccggcggcgctaagatggcggcggcggcggcggcggccgtggcgggggtggggcgcggtggcggtggcgcggagccacggcaggagcggagccgggcccggggctgggccggcgtcgaacgcagcgaaggccggaggatggaaccaggtgaggagctggaagaggagggctctccaggtggccgtgaggatggcttcaccgccgagcacctggctgcagaggccatggcagctgacatggacccctggctagtgtttgatgcccgcacaacgcctgccactgagctggatgcctggctggccaagtacccaccatcccaagttacccgctatggggaccccggttcacccaactcagagcctgtgggctggattgcagtgtatgggcagggctacagccccaactccggggacgtgcagggcctgcaggcagcctgggaagctctgcagaccagtgggcggcccatcacaccgggtaccctgcgccagctcgccatcacccaccacgtgctctcgggcaagtggcttatgcatctggcaccgggcttcaagctggaccacgcctgggctggcattgcccgggccgtggttgaaggccggcttcaggtggccaaggtgagcccacgtgccaaggagggtgggcgccaggtcatctgtgtttacacggacgacttcacggaccgcttgggtgtactggaggcggattcagccatccgtgcagcgggcattaagtgcctgctcacctacaagcctgatgtctacacctacctgggcatctaccgggccaatcgctggcacctctgccccactctctatgananccgtttccagcttgggggtagtgcccngtggctccnantgcttgaccgtgccaacaacgtggaactgacctaaagggncnaattggggaaactgccccactcccccntcatgctggggttgnatcctcctgtcttccncntgtccatgaaagccaaccccccanctttggganncctaggtcanttggaaatacttgcatttnaatccccttgaattttgccctttgttcagggnnaaanaacccccaaggnttgggggntccggttncctaaagaaaaancctncccccccctttnaagnngcnccccccnggcccnnccntnatttggncaaacctaaaanaaaaattttnnaaacttttcccnnaaanncccttcccnganttcccttttttttccccaaaaaaaaaatatnttccccttttnac

SEQ ID NO: 197 - DNA, 1024 bp, Homo Sapiens
  misc_feature (913)..(913): n is a, c, g, or t
  misc_feature (937)..(937): n is a, c, g, or t
  misc_feature (940)..(940): n is a, c, g, or t
  misc_feature (952)..(952): n is a, c, g, or t
  misc_feature (985)..(985): n is a, c, g, or t
  misc_feature (998)..(998): n is a, c, g, or t
  misc_feature (1008)..(1008): n is a, c, g, or t
  misc_feature (1010)..(1010): n is a, c, g, or t
  misc_feature (1019)..(1019): n is a, c, g, or t
caatagagagattactatgagaggatcgcatcaccatcaccatcacggatcctatttaggtgacactatagaatcgtcgacccacgcgtccgctctgacgtgggagccgccgtcgctgccgccacccggaggctcttgtcaggatggtgaagctgttcatcggaaaccttccccgggaggctacagagcaggagattcgctcactcttcgagcagtatgggaaggtgctggaatgtgacatcattaagaattacggctttgtgcacatagaagacaagacggcagctgaggatgccatacgcaacctgcaccattacaagcttcatggggtgaacatcaacgtggaagccagcaagaataagagcaaagcttcaaccaagttacacgtgggtaacatcagccccacttgtaccaaccaagagcttcgagccaagtttgaggagtatggtccggtcatcgaatgtgacatcgtgaaagattatgccttcgtacacatggagcgggcagaggatgcagtggaggccatcaggggccttgacaacacagagtttcaaggtgaactgctctgggcctgggtagtagcgccgagtggggtctagctcaaaacaggcaagaacacaagactatagaacttgctgggtggtctcttccattctgttttagctggaaataatagattatgtttaccgctcttaagcataatttacccctggggaagcaaacacttccccttttcaggtttgctaagatgttgctcaccgactgcatagaatcacaaactgtgggttactttaccctgcgggaattcttgcattgattccaagtgctgttggaaagtgtaatctgctttgggggaaaacgagtaacctcatgagaaaaagggaggaataaagggtcccgtggcttacctgcnttctttggtgaatgatcaagaaanccnttatatttgaangggtttaaagtgctttaaaaatttaaaatttcntttaactgctttngggggggaananctggtgggngaaaa

SEQ ID NO: 198 - DNA, 1149 bp, Homo Sapiens
  misc_feature (3)..(3): n is a, c, g, or t
  misc_feature (17)..(17): n is a, c, g, or t
  misc_feature (20)..(21): n is a, c, g, or t
  misc_feature (40)..(40): n is a, c, g, or t
  misc_feature (47)..(47): n is a, c, g, or t
  misc_feature (54)..(54): n is a, c, g, or t
  misc_feature (74)..(74): n is a, c, g, or t
  misc_feature (85)..(85): n is a, c, g, or t
  misc_feature (98)..(98): n is a, c, g, or t
  misc_feature (874)..(874): n is a, c, g, or t
  misc_feature (936)..(936): n is a, c, g, or t
  misc_feature (961)..(961): n is a, c, g, or t
  misc_feature (990)..(990): n is a, c, g, or t
  misc_feature (1013)..(1013): n is a, c, g, or t
  misc_feature (1015)..(1015): n is a, c, g, or t
  misc_feature (1017)..(1017): n is a, c, g, or t
  misc_feature (1020)..(1020): n is a, c, g, or t
  misc_feature (1025)..(1025): n is a, c, g, or t
  misc_feature (1034)..(1034): n is a, c, g, or t
  misc_feature (1041)..(1041): n is a, c, g, or t
  misc_feature (1043)..(1043): n is a, c, g, or t
  misc_feature (1048)..(1048): n is a, c, g, or t
  misc_feature (1067)..(1067): n is a, c, g, or t
  misc_feature (1094)..(1094): n is a, c, g, or t
  misc_feature (1097)..(1097): n is a, c, g, or t
  misc_feature (1107)..(1107): n is a, c, g, or t
  misc_feature (1109)..(1109): n is a, c, g, or t
  misc_feature (1123)..(1123): n is a, c, g, or t
  misc_feature (1126)..(1126): n is a, c, g, or t
  misc_feature (1129)..(1129): n is a, c, g, or t
  misc_feature (1136)..(1136): n is a, c, g, or t
  misc_feature (1139)..(1149): n is a, c, g, or t
ttngaggaaaaattacnttnnagagggatcgcatcaccantcaccantcacggnatcctatttagggtgacacntatagaatcgntcgacccacgcgntccgaggccaaagactctttacggaaggttcgcaccaactcaatgaacaagctgaagaaatccaaggatacagtctcagaggacaccattaggctaatagagaaacagatcagccaaatggccgatgacacagtggcagaactggacaggcatctggcagtgaagaccaaagaactccttggatgaaagtccactggggccagcaatactccagagcccagtttctgctggatcccatgggtggcacattgggacttctctccctcccccatctacacagaagactgtcaccatgctgacagaagcctgtccttgtaaggcccagccttccaggggaacactcagacatgttcattctcttcctgcttctgctctgggccggtgggtggctctcagaaaatacttgctgctggcaaaaggcctgtactcaggcatttgctttgacttgatgttgccaagggactgaggccattggcaggcttagtaccacctgctcctcatcttaggagtctccttttcaaataattaggctctgttcccattttaaaactctgatattggccttcacctgtgactggacactttactagaggcccattttcactaaacaataaaatctaaataaattggaaggaataacaaccacaaaggaaagaatagagttggtctggattgatgatcactgaggatctgtatgtgaggcacccataacagtagttttgcctgtgagtcgtcttcacacatgctgttttctctgcctggctctctcttccccntccttacctggccagtcctgtttatcatcaggccttgtcttggatatcacgtccctctgggnaagtcttctttttcccctctaaccntaggacccctcatttaccggctctcatancacagtctactgctttgtacaantncnaantattncttgttgcncttaatnancctgnaaatcctcaaaactttggntatgcctggaacaaaataggcagtctntgntgtatcgggnanaaatttgcccatantanctnccccccnaannnnnnnnnnn

SEQ ID NO: 199 - DNA, 1181 bp, Homo Sapiens
  misc_feature (1)..(3): n is a, c, g, or t
  misc_feature (787)..(787): n is a, c, g, or t
  misc_feature (891)..(891): n is a, c, g, or t
  misc_feature (901)..(901): n is a, c, g, or t
  misc_feature (957)..(957): n is a, c, g, or t
  misc_feature (964)..(964): n is a, c, g, or t
  misc_feature (973)..(973): n is a, c, g, or t
  misc_feature (1003)..(1003): n is a, c, g, or t
  misc_feature (1005)..(1005): n is a, c, g, or t
  misc_feature (1024)..(1024): n is a, c, g, or t
  misc_feature (1039)..(1039): n is a, c, g, or t
  misc_feature (1044)..(1044): n is a, c, g, or t
  misc_feature (1063)..(1063): n is a, c, g, or t
  misc_feature (1078)..(1078): n is a, c, g, or t
  misc_feature (1082)..(1082): n is a, c, g, or t
  misc_feature (1109)..(1109): n is a, c, g, or t
  misc_feature (1113)..(1113): n is a, c, g, or t
  misc_feature (1118)..(1118): n is a, c, g, or t
  misc_feature (1122)..(1123): n is a, c, g, or t
  misc_feature (1131)..(1132): n is a, c, g, or t
  misc_feature (1140)..(1140): n is a, c, g, or t
  misc_feature (1148)..(1148): n is a, c, g, or t
  misc_feature (1157)..(1157): n is a, c, g, or t
  misc_feature (1160)..(1161): n is a, c, g, or t
  misc_feature (1165)..(1165): n is a, c, g, or t
  misc_feature (1168)..(1168): n is a, c, g, or t
  misc_feature (1170)..(1170): n is a, c, g, or t
  misc_feature (1181)..(1181): n is a, c, g, or t
nnntagagagattactatgagaggatcgcatcaccatcaccatcacggatcctatttaggtgacactatagaatcgtcgacccacgcgtccggtaggcagcggcgccgcgtccgctctcgcccgctctcgcccgctcgccagccggctctcctcccgccgcaggacccgcgcgccgcgctcgggggccatgcagcgcctggccatggacctgcggatgttgtcccgggagctctccctctacctggaacaccaagtccgggtggggttcttcggctcgggggtgggcttatcccttatcctgggcttcagcgtcgcttatgccttctactacctgagcagcattgccaagaaaccccagttagtgaccgggggtgagagtttcagccgcttccttcaagaccactgtcccgtggttacagaaacgtactacccgacggtctggtgctgggagggtcgaggacagaccctgcttagacctttcatcacttcgaagcccccggtgcagtacaggaatgaacttattaaaactgcagatggaggacagatttcactggactggtttgataatgataacagtacgtgttatatggatgccagcaccagacctactatcttattgttgcctggcctcacgggaacaagcaaggagtcatatatccttcatatgatccatcttagtgaagaattaggatacagatgtgtggtttttaacaacagaggagtggcgggggagaatctcttgaaatagaaacagcccaaacaatttaaacgccaaggacttattgnttgtgctaacactgaagacttggagacagttattcaccatgtacacagcctgtacccttctgctcctttcctggcaacaaggggttttcaatgggaagggtaangtttttcccntttctaaaataatctctgaaaaggaaagctattttatttggctgtctctttgaaangaactanaaacctaanctgtatggaacactttttttaaaaaaatgncngaattatgtttatcaaaanttttaattaaatgcnggttnaattgaaatgaaccaaagnaaggaaaaaaattanttcnggggaaattttaaaatttttttttaantaangggtntctnngaattgcnnaattttgntaaacccnaaaggtttnttnnaaanccnanaaatcaaatgn

SEQ ID NO: 200 - DNA, 1207 bp, Homo Sapiens
  misc_feature (782)..(782): n is a, c, g, or t
  misc_feature (852)..(852): n is a, c, g, or t
  misc_feature (861)..(861): n is a, c, g, or t
  misc_feature (867)..(867): n is a, c, g, or t
  misc_feature (884)..(884): n is a, c, g, or t
  misc_feature (919)..(919): n is a, c, g, or t
  misc_feature (938)..(938): n is a, c, g, or t
  misc_feature (950)..(950): n is a, c, g, or t
  misc_feature (984)..(984): n is a, c, g, or t
  misc_feature (993)..(993): n is a, c, g, or t
  misc_feature (995)..(995): n is a, c, g, or t
  misc_feature (998)..(998): n is a, c, g, or t
  misc_feature (1039)..(1039): n is a, c, g, or t
  misc_feature (1043)..(1043): n is a, c, g, or t
  misc_feature (1059)..(1059): n is a, c, g, or t
  misc_feature (1084)..(1084): n is a, c, g, or t
  misc_feature (1088)..(1088): n is a, c, g, or t
  misc_feature (1091)..(1091): n is a, c, g, or t
  misc_feature (1107)..(1107): n is a, c, g, or t
  misc_feature (1109)..(1109): n is a, c, g, or t
  misc_feature (1111)..(1111): n is a, c, g, or t
  misc_feature (1126)..(1126): n is a, c, g, or t
  misc_feature (1139)..(1139): n is a, c, g, or t
  misc_feature (1142)..(1142): n is a, c, g, or t
  misc_feature (1154)..(1154): n is a, c, g, or t
  misc_feature (1156)..(1156): n is a, c, g, or t
  misc_feature (1158)..(1159): n is a, c, g, or t
  misc_feature (1170)..(1170): n is a, c, g, or t
  misc_feature (1175)..(1175): n is a, c, g, or t
  misc_feature (1180)..(1180): n is a, c, g, or t
  misc_feature (1194)..(1197): n is a, c, g, or t
  misc_feature (1199)..(1207): n is a, c, g, or t
tagagaaattaactatgagaggatcgcatcaccatcaccatcacggatcctatttaggtgacactatagaatcgtcgacccacgcgtccggcgacacccacacagacgtggcaggtctacctccactccctgcagcgcgtggatgtctcctgcgtcgcaggccagctgacccgcctgtcccttgtccttcgggggacacagacagtgaggaaagtgagagctttcacctctcatccccaggagctgaagacagaccccaaaggtgtcttcgtgctgccgcctcgtggggtgcaggacctgcatgttggcgtgaggccccttagggccggcagccgctttgtccatctcaacctggtggacgtggattgccaccagctggtggcctcctggctcgtgtgcctctgctgccgccagccgctcatctccaaggcctttgagatcatgttggctgcgggcgaagggaagggtgtcaacaagaggatcacctacaccaacccctacccctcccggaggacattccacctgcacagcgaccacccggagctgctgcggttcagagaggactccttccaggtcgggggtggagagacctacaccatcggcttgcagtttgcgcctagtcagagagtgggtgaggaggagatcctgatctacatcaatgaccatgaggacaaaaacgaagaggcattttgcgtgaaggtcatctaccagtgagggcttgagggtgacgtccttcctgcggcacccagctggggcctgtctgtgcccctcctgccctgcangctgtcctccccgcctctctgcagcctttcacttcagtgcccacctggctgacctgtgcacttggctgangaagcaaanaccgancgctggtcattttgtantacctgcatccagcttaactgctgctgacacccancaggcctgggttccgtgancgcgaactccgnggtggtgggtctggctctggtgctgccatctacncatgtgggnanccntcgttatccctgttgctccaaaatgtatttttatgaaatcntccntaaatgaaaaaattangttttttctaactggatttttgtanaaanaanaatctaatattttgcnangnaaaaaatttaaggcngggaattaaaacnggnttttttaaaatngntnnaaaaaaaaaantaaanttttnaaaaaaaaaaaaannnnannnnnnnnn

SEQ ID NO: 201 - DNA, 687 bp, Homo Sapiens
  misc_feature (530)..(530): n is a, c, g, or t
  misc_feature (541)..(541): n is a, c, g, or t
  misc_feature (598)..(598): n is a, c, g, or t
  misc_feature (613)..(613): n is a, c, g, or t
  misc_feature (625)..(625): n is a, c, g, or t
  misc_feature (639)..(639): n is a, c, g, or t
  misc_feature (644)..(644): n is a, c, g, or t
  misc_feature (651)..(651): n is a, c, g, or t
  misc_feature (657)..(657): n is a, c, g, or t
  misc_feature (663)..(663): n is a, c, g, or t
  misc_feature (666)..(666): n is a, c, g, or t
  misc_feature (668)..(668): n is a, c, g, or t
  misc_feature (671)..(672): n is a, c, g, or t
  misc_feature (674)..(674): n is a, c, g, or t
  misc_feature (677)..(677): n is a, c, g, or t
  misc_feature (679)..(679): n is a, c, g, or t
  misc_feature (683)..(683): n is a, c, g, or t
attagagaaattactatgagaggatcgcatcaccatcaccatcacggatcctatttaggtgacactatagaatcgtcgacccacgcgtccgcacgcctctcggaaggccagggcgggcgagcccccgaggcccgagggagagggaagagcgccgggcccgggtcgcggaggcgggcgccgccggaacgcgaagcgcggggctactgcgggcaggcgcgagttcgcgcagcaccgcccccggcgtgacctgctggtcgcttccggcgcgggaggagaatgtggccgccttgcgggacgctccggaccctggccttggcgcggtcgcggggagcccgggcctgcagcggggatgggggcgtttcctacacgcagggccagagtccggagccgcggacccgcgagtatttctactacgtggaccaccagggccagcttttcctggatgattccaaaatgaagaatttcatcacctgcttcaaagacccgcagttcctggtcaccttcttctcccgcctgagacccaaccgcancgggcgctacnaggccgctttccccttcctctcgccctgcggcagagagcgcaacttcctgcgctgcnaggaccggccggtgntcttcacgcacntgctgaccgcggancacgngcctccnctcctntcctantgnancanntngcnangccntgat

SEQ ID NO: 202 - DNA, 1242 bp, Homo Sapiens
  misc_feature (861)..(861): n is a, c, g, or t
  misc_feature (879)..(879): n is a, c, g, or t
  misc_feature (916)..(916): n is a, c, g, or t
  misc_feature (928)..(928): n is a, c, g, or t
  misc_feature (930)..(930): n is a, c, g, or t
  misc_feature (933)..(933): n is a, c, g, or t
  misc_feature (943)..(943): n is a, c, g, or t
  misc_feature (949)..(949): n is a, c, g, or t
  misc_feature (956)..(956): n is a, c, g, or t
  misc_feature (986)..(986): n is a, c, g, or t
  misc_feature (988)..(988): n is a, c, g, or t
  misc_feature (992)..(992): n is a, c, g, or t
  misc_feature (1008)..(1008): n is a, c, g, or t
  misc_feature (1021)..(1021): n is a, c, g, or t
  misc_feature (1030)..(1030): n is a, c, g, or t
  misc_feature (1034)..(1035): n is a, c, g, or t
  misc_feature (1057)..(1058): n is a, c, g, or t
  misc_feature (1075)..(1075): n is a, c, g, or t
  misc_feature (1082)..(1082): n is a, c, g, or t
  misc_feature (1084)..(1084): n is a, c, g, or t
  misc_feature (1098)..(1098): n is a, c, g, or t
  misc_feature (1117)..(1117): n is a, c, g, or t
  misc_feature (1140)..(1140): n is a, c, g, or t
  misc_feature (1148)..(1148): n is a, c, g, or t
  misc_feature (1155)..(1155): n is a, c, g, or t
  misc_feature (1159)..(1159): n is a, c, g, or t
  misc_feature (1161)..(1161): n is a, c, g, or t
  misc_feature (1169)..(1169): n is a, c, g, or t
  misc_feature (1174)..(1174): n is a, c, g, or t
  misc_feature (1177)..(1177): n is a, c, g, or t
  misc_feature (1183)..(1183): n is a, c, g, or t
  misc_feature (1185)..(1185): n is a, c, g, or t
  misc_feature (1187)..(1187): n is a, c, g, or t
  misc_feature (1189)..(1189): n is a, c, g, or t
  misc_feature (1195)..(1195): n is a, c, g, or t
  misc_feature (1204)..(1205): n is a, c, g, or t
  misc_feature (1211)..(1211): n is a, c, g, or t
  misc_feature (1239)..(1240): n is a, c, g, or t
gagagattaactatgagaggatcgcatcaccatcaccatcacggatcctatttaggtgacactatagaatcgtcgacccacgcgtccgggaacaactcctccaacatctgggccctgcgacagatcgcggacttcatggccagcacctcccacgcagtcttcccgacatcttccatgaatgtctccatgatgacgcctatcaatgacctccacacagctgactccctgaacctggccaaaggggagcggctcatgcggtgcaagatcagcagtgtctaccgactcctggacctctatggctgggcccagctgagtgacacctatgtcacgttgagagtcagcaaggagcaggaccacttcctgatcagccctaagggagtttcttgcagtgaagtcacagcgtccagcctgatcaaggtgaacattctgggagaggtggtggagaagggcagcagctgcttcccagtggacaccacaggcttctgtctgcactcggccatctatgcagcgaggcccgacgtgcgctgcatcatccacctgcacacaccggccacagcagcggtgtcggccatgaagtggggcctcctgcctgtctcccacaatgccctgctggtgggggacatggcctattatgacttcaatggggaaatggagcaggaagccgatcggatcaacctgcagaagtgccttggacccacctgcaagatcctggtgctaagaaaccatggagtggttgctctgggtgacacggtagaggaggcattttacaagatcttccacctgcaggctgcatgtgagatacaggtgtcggctctgtccagtgccgggggagtggagaacctcatcctcctggagcagganaagcaccggccccatgangtgggctccgtgcagtgggccgggagcacctttgggncctatgcaaaanantcngctgggggancatgantttgagncctcatgaggatgctggaaacctgggctananaaangttacacgtatccccncccctttgttcanaaaaaaccnaacnnaaagtgaggggaaattcagccnnggtcaagccttctgttnaagagangngccccgggcccccntggaaagctgcccaaaacncaaaagaaaaaccgttggttaanaccccaancctactngggntnattgggcnaaaantcnaaaaantngncncccccnccaaaaccnnggaaanggggaaagggaaaaaccccaggggtgcnntt

SEQ ID NO: 203 - DNA, 1041 bp, Homo Sapiens
  misc_feature (8)..(8): n is a, c, g, or t
  misc_feature (29)..(29): n is a, c, g, or t
  misc_feature (32)..(32): n is a, c, g, or t
  misc_feature (48)..(48): n is a, c, g, or t
  misc_feature (55)..(55): n is a, c, g, or t
  misc_feature (68)..(68): n is a, c, g, or t
  misc_feature (556)..(556): n is a, c, g, or t
  misc_feature (562)..(562): n is a, c, g, or t
  misc_feature (679)..(679): n is a, c, g, or t
  misc_feature (765)..(765): n is a, c, g, or t
  misc_feature (779)..(779): n is a, c, g, or t
  misc_feature (802)..(802): n is a, c, g, or t
  misc_feature (816)..(816): n is a, c, g, or t
  misc_feature (820)..(820): n is a, c, g, or t
  misc_feature (826)..(826): n is a, c, g, or t
  misc_feature (845)..(845): n is a, c, g, or t
  misc_feature (863)..(863): n is a, c, g, or t
  misc_feature (904)..(904): n is a, c, g, or t
  misc_feature (911)..(911): n is a, c, g, or t
  misc_feature (914)..(914): n is a, c, g, or t
  misc_feature (923)..(923): n is a, c, g, or t
  misc_feature (935)..(935): n is a, c, g, or t
  misc_feature (938)..(938): n is a, c, g, or t
  misc_feature (942)..(942): n is a, c, g, or t
  misc_feature (949)..(949): n is a, c, g, or t
  misc_feature (956)..(956): n is a, c, g, or t
  misc_feature (972)..(972): n is a, c, g, or t
  misc_feature (981)..(981): n is a, c, g, or t
  misc_feature (984)..(984): n is a, c, g, or t
  misc_feature (987)..(987): n is a, c, g, or t
  misc_feature (989)..(989): n is a, c, g, or t
  misc_feature (993)..(993): n is a, c, g, or t
  misc_feature (999)..(1000): n is a, c, g, or t
  misc_feature (1003)..(1003): n is a, c, g, or t
  misc_feature (1029)..(1029): n is a, c, g, or t
  misc_feature (1031)..(1031): n is a, c, g, or t
  misc_feature (1038)..(1038): n is a, c, g, or t
  misc_feature (1040)..(1041): n is a, c, g, or t
agagaaanttctatgagaggatcgcatcnccntcaccatcacgggatnctatttnggtgacactatanaatcgtcgacccacgcgtccgcccacgcgtccgccatctcggagcggtggcagcaggaggtggcagagactgtcttcgacaccatcaacgctgagacagaccggctggaggctcgcaagaaagccaagaacaagcagctgggccatgaggaagactacgccctgggcaaggactgcatcatgcatggctacatgtccaagatgggcaaccccttcctgacccagtggcagcggcggtacttctacctgttccccaaccgcctcgagtggcggggcgagggcgaggccccgcagagcctgctgaccatggaggagatccagtcggtggaggagacgcagatcaaggagcgcaagtgcctgctcctcaagatccgcggtgggaaacagttcattttgcagtgcgatagcgaccctgagctggtgcagtggaagaaggagctgcgcgacgcctaccgcgaggcccagcagctggtgcagcgggtgcccaanatgaanaacaagccgcgctcgcccgtggtggagctgagcaaggtgccgctggtccagcgcggcagtgccaacggcctctgacccgcccacccgccttttataaacctctaatttattttgtcnaatttttattatttgttttcccgccaagcggaaaaggttttattttgtaattattgtgatttcccgtggccccagcctggccccanctcccccgggaggngcccgcttgccctcggctcctgntgcaccaaacccanccgntgcccnggcgcccctctgtcctganttccaggggctgcccgcntcccaagtgtctttccttgtggggggaaaaagaaaagcccntcccgtnccntttcccccnagggaatgatgncanaccnaagcttnttgccanccctggggcttctgtngggcttgcnctnttntncccntggggnnatngttgggtgggccccattccccccctnancaggggncnn

SEQ ID NO: 204 - DNA, 1280 bp, Homo Sapiens
  misc_feature (1)..(1): n is a, c, g, or t
  misc_feature (916)..(916): n is a, c, g, or t
  misc_feature (919)..(919): n is a, c, g, or t
  misc_feature (959)..(959): n is a, c, g, or t
  misc_feature (970)..(970): n is a, c, g, or t
  misc_feature (995)..(995): n is a, c, g, or t
  misc_feature (997)..(997): n is a, c, g, or t
  misc_feature (1011)..(1011): n is a, c, g, or t
  misc_feature (1014)..(1014): n is a, c, g, or t
  misc_feature (1026)..(1026): n is a, c, g, or t
  misc_feature (1047)..(1047): n is a, c, g, or t
  misc_feature (1058)..(1059): n is a, c, g, or t
  misc_feature (1080)..(1080): n is a, c, g, or t
  misc_feature (1086)..(1086): n is a, c, g, or t
  misc_feature (1089)..(1089): n is a, c, g, or t
  misc_feature (1091)..(1091): n is a, c, g, or t
  misc_feature (1109)..(1109): n is a, c, g, or t
  misc_feature (1114)..(1114): n is a, c, g, or t
  misc_feature (1125)..(1125): n is a, c, g, or t
  misc_feature (1131)..(1131): n is a, c, g, or t
  misc_feature (1133)..(1133): n is a, c, g, or t
  misc_feature (1149)..(1149): n is a, c, g, or t
  misc_feature (1162)..(1162): n is a, c, g, or t
  misc_feature (1177)..(1178): n is a, c, g, or t
  misc_feature (1180)..(1180): n is a, c, g, or t
  misc_feature (1183)..(1184): n is a, c, g, or t
  misc_feature (1187)..(1187): n is a, c, g, or t
  misc_feature (1195)..(1196): n is a, c, g, or t
  misc_feature (1199)..(1199): n is a, c, g, or t
  misc_feature (1222)..(1222): n is a, c, g, or t
  misc_feature (1226)..(1226): n is a, c, g, or t
  misc_feature (1230)..(1230): n is a, c, g, or t
  misc_feature (1232)..(1232): n is a, c, g, or t
  misc_feature (1246)..(1246): n is a, c, g, or t
  misc_feature (1251)..(1252): n is a, c, g, or t
  misc_feature (1267)..(1267): n is a, c, g, or t
  misc_feature (1274)..(1274): n is a, c, g, or t
  misc_feature (1279)..(1280): n is a, c, g, or t
naatagagaaattactatgagaggatcgcatcaccatcaccatcacggatcctatttaggtgacactatagaatcgtcgacccacgcgtccgctccgggtgcgagagacaggtcgggccccctaggcagcgagccgcagcgcaatcccggcgctcgcccaaggaccctggaagctaccgttaccccgccgggcagcgtgggcgccatgagcagctcgggactgaattcggagaaggtagctgctctgatacagaaactgaattccgacccccagttcgtacttgcccagaatgtcgggaccacccacgacctgctggacatctgtctgaagcgggccacggtgcagcgcgcgcagcatgtgttccagcacgccgtgccccaggagggcaagccaatcaccaaccagaagagctcagggcgatgctggatcttttcttgtctgaatgttatgaggcttccattcatgaaaaagttaaatattgaagaatttgagtttagccaatcttacctgtttttttgggacaaggttgaacgctgttatttcttcttgagtgcttttgtggacacagcccagagaaaggagcctgaggatgggaggctggtgcagtttttgcttatgaaccctgcaaatgatggtggccaatgggatatgcttgttaatattgttgaaaaatatggtgttatccctaagaaatgcttccctgaatcttatacaacagaggcaaccagaaggatgaatgatattctgaatcacaagatgagagaattctgtatacgactgcggaacctggtacacagtggagcaacgaaaggagaaatctcggccacacaggacgtcatgatggaggagatattccgagtggtgtgcatctgtttgggtaatccaccagagacattcacctggggaatatcgagnacnaagataaaaattatcagaaaattggcccccataacacccnttggagttttnacagggaacatgtcaagcccactcntncaatatggaaaaanaanaatttgttttantgaatgaccctaggcccccancccaagtacannaaactttacccagtggaaaancttaancantntggttggagggaaaaaanctctnaacaaaaaccngcccantnactttcttaaaaaaanggttgctgccccnatcaaaaaaggaaanncntgnnggnttggcctnnaanttgaaaaaacctttaaaaaaagntggncccnanggaatgaaaccctnaaacnngaataaggttggggnccccttnaaaann

SEQ ID NO: 205 - DNA, 1286 bp, Homo Sapiens
  misc_feature (14)..(14): n is a, c, g, or t
  misc_feature (882)..(882): n is a, c, g, or t
  misc_feature (905)..(905): n is a, c, g, or t
  misc_feature (950)..(950): n is a, c, g, or t
  misc_feature (971)..(971): n is a, c, g, or t
  misc_feature (1002)..(1002): n is a, c, g, or t
  misc_feature (1024)..(1024): n is a, c, g, or t
  misc_feature (1039)..(1039): n is a, c, g, or t
  misc_feature (1045)..(1045): n is a, c, g, or t
  misc_feature (1072)..(1072): n is a, c, g, or t
  misc_feature (1081)..(1081): n is a, c, g, or t
  misc_feature (1106)..(1106): n is a, c, g, or t
  misc_feature (1108)..(1108): n is a, c, g, or t
  misc_feature (1118)..(1118): n is a, c, g, or t
  misc_feature (1138)..(1138): n is a, c, g, or t
  misc_feature (1141)..(1141): n is a, c, g, or t
  misc_feature (1160)..(1160): n is a, c, g, or t
  misc_feature (1166)..(1167): n is a, c, g, or t
  misc_feature (1176)..(1177): n is a, c, g, or t
  misc_feature (1179)..(1179): n is a, c, g, or t
  misc_feature (1187)..(1187): n is a, c, g, or t
  misc_feature (1194)..(1195): n is a, c, g, or t
  misc_feature (1205)..(1205): n is a, c, g, or t
  misc_feature (1207)..(1208): n is a, c, g, or t
  misc_feature (1210)..(1210): n is a, c, g, or t
  misc_feature (1235)..(1235): n is a, c, g, or t
  misc_feature (1237)..(1237): n is a, c, g, or t
  misc_feature (1241)..(1242): n is a, c, g, or t
  misc_feature (1249)..(1249): n is a, c, g, or t
  misc_feature (1258)..(1258): n is a, c, g, or t
  misc_feature (1262)..(1262): n is a, c, g, or t
  misc_feature (1271)..(1271): n is a, c, g, or t
  misc_feature (1277)..(1277): n is a, c, g, or t
  misc_feature (1279)..(1279): n is a, c, g, or t
aatagagaaattanctatgagaggatcgcatcaccatcaccatcacggatcctatttaggtgacactatagaatcgtcgacccacgcgtccgcccacgcgtccgcccacgcgtccgcaaataatgaagaaggtgtaaagcttgttcgaatgtctgcaagccagttagaagccctctgtcctcaggttattaatgctgcactggctttagcagcaaaaccacagagtaaactggcccaagagaacatggatctttttaaagaacaatgggaaaaacaagtccgtgttctcacagatgctgtcgatgacattacttccattgatgacttcttggctgtctcagagaatcacattttggaagatgtgaacaaatgtgtcattgctctccaagagaaggatgtggatggcctggaccgcacagctggtgcaattcgaggccgggcagcccgggtcattcacgtagtcacctcagagatggacaactatgagccaggagtctacacagagaaggttctggaagccactaagctgctctccaacacagtcatgccacgttttactgagcaagtagaagcagccgtggaagccctcagctcggaccctgcccagcccatggatgagaatgagtttatcgatgcttcccgcctggtatatgatggcatccgggacatcaggaaagcagtgctgatgataaggacccctgaggagttggatgactctgactttgagacagaagattttgatgtcagaagcaggacgagcgtccagacagaagacgatcagctgatagctggccagagtgcccgggcgatcatggctcagcttccccaggagcaaaaagcgaagattgcggaacaggtggccagcttccaggaagaaaaaancaagctggatgctgaagtgtccnaaatgggacgacagtggcaatgacatcattgtgctggccaagcanatgtgcatgattatgatgganatgaacagactttacccgaggtaaaggaccnctcaaaaatacatcggatgtcnatcagtgctgccaanaaaatngctgaggcaggatccaggatggacaanccttggccnccccattgcaaaacattgcccccancncgcttgcaancaggaacctggtggcctacntgnaaagcatccccctctatgnccccannttaaaaatnngnaccagggnaaggccnnaagggcaaantnncngcgggggaacttttttccttggggngnaaannccctgtncctgatccnggcncccaaaaanttttananggtttgg

SEQ ID NO: 206 - DNA, 1304 bp, Homo Sapiens
  misc_feature (787)..(787): n is a, c, g, or t
  misc_feature (893)..(893): n is a, c, g, or t
  misc_feature (926)..(926): n is a, c, g, or t
  misc_feature (943)..(943): n is a, c, g, or t
  misc_feature (957)..(957): n is a, c, g, or t
  misc_feature (987)..(987): n is a, c, g, or t
  misc_feature (1007)..(1007): n is a, c, g, or t
  misc_feature (1022)..(1023): n is a, c, g, or t
  misc_feature (1025)..(1025): n is a, c, g, or t
  misc_feature (1030)..(1030): n is a, c, g, or t
  misc_feature (1038)..(1038): n is a, c, g, or t
  misc_feature (1043)..(1043): n is a, c, g, or t
  misc_feature (1072)..(1072): n is a, c, g, or t
  misc_feature (1081)..(1082): n is a, c, g, or t
  misc_feature (1087)..(1088): n is a, c, g, or t
  misc_feature (1093)..(1093): n is a, c, g, or t
  misc_feature (1096)..(1097): n is a, c, g, or t
  misc_feature (1109)..(1110): n is a, c, g, or t
  misc_feature (1124)..(1125): n is a, c, g, or t
  misc_feature (1128)..(1128): n is a, c, g, or t
  misc_feature (1141)..(1141): n is a, c, g, or t
  misc_feature (1152)..(1152): n is a, c, g, or t
  misc_feature (1154)..(1154): n is a, c, g, or t
  misc_feature (1187)..(1187): n is a, c, g, or t
  misc_feature (1192)..(1192): n is a, c, g, or t
  misc_feature (1194)..(1194): n is a, c, g, or t
  misc_feature (1203)..(1203): n is a, c, g, or t
  misc_feature (1207)..(1207): n is a, c, g, or t
  misc_feature (1210)..(1210): n is a, c, g, or t
  misc_feature (1220)..(1220): n is a, c, g, or t
  misc_feature (1235)..(1235): n is a, c, g, or t
  misc_feature (1242)..(1242): n is a, c, g, or t
  misc_feature (1247)..(1247): n is a, c, g, or t
  misc_feature (1274)..(1274): n is a, c, g, or t
  misc_feature (1277)..(1277): n is a, c, g, or t
  misc_feature (1283)..(1283): n is a, c, g, or t
  misc_feature (1289)..(1290): n is a, c, g, or t
tagagagattactatgagaggatcgcatcaccatcaccatcacggatcctatttaggtgacactatagaatcgtcgacccacgcgtccgccttatggcgcagaaacgccgagggtgaacccgtgtgcaatgcttgtggactctacatgaaactccatggggtgcccagaccacttgctatgaaaaaagagggaattcaaaccaggaaacgaaaacctaagaacataaataaatcaaagacttgctctggtaatagcaataattccattcccatgactccaacttccacctcttctaactcagatgattgcagcaaaaatacttcccccacaacacaacctacagcctcaggggcgggtgccccggtgatgactggtgcgggagagagcaccaatcccgagaacagcgagctcaagtattcgggtcaagatgggctctacataggcgtcagtctcgcctcgccggccgaagtcacgtcctccgtgcgaccggattcctggtgcgccctggccctggcctgagcccacgccgccaggaggcagggagggctccgccgcgggcctcactccactcgtgtctgcttttgtgcagcagtccggacagtggcgactgcgctgacagaacgtgattctcgtgcctttattttgaaagagatgtttttcccaagaggcttgctgaaagagtgagagaagatggaagggaagggccagtgcaactgggcgcttgggccactccagccagcccgcctccggggcggaccctgctccacttccagaagccaggactangacctgggccttgcctgctatggaatattgagagagattttttaaaaaagattttgcattttgtccaaaatcatgtgcttcttctgatcaattttggttgttccanaatttcttcataccttttccacatccagatttncatgtgcgttcatgganaaaaatcacttgangccatttggtacacatctctggaagctgantcggttcatgaaggtccctnatcaaaaatattacnncntttgnaaaaatgncttgntaactttaaaaatacctggggactgaagntttcccaannttcannttggnggnntattttaaatcnntcggaatttttaannggntaacaaaaaaaantttttttccangnaaaaaaaattttttaaaagggcatttgggttgnacaancnggttaaatntttngcnaaaattaaancctttttttaaaggngggaacntttantttgggccttaaaaatttaaaaaaagntanttaaantttttnnttttaaaaaacccc

SEQ ID NO: 207 - DNA, 1207 bp, Homo Sapiens
  misc_feature (761)..(761): n is a, c, g, or t
  misc_feature (782)..(782): n is a, c, g, or t
  misc_feature (820)..(820): n is a, c, g, or t
  misc_feature (825)..(825): n is a, c, g, or t
  misc_feature (852)..(852): n is a, c, g, or t
  misc_feature (889)..(889): n is a, c, g, or t
  misc_feature (909)..(909): n is a, c, g, or t
  misc_feature (939)..(939): n is a, c, g, or t
  misc_feature (969)..(969): n is a, c, g, or t
  misc_feature (981)..(981): n is a, c, g, or t
  misc_feature (983)..(983): n is a, c, g, or t
  misc_feature (1037)..(1037): n is a, c, g, or t
  misc_feature (1042)..(1042): n is a, c, g, or t
  misc_feature (1047)..(1047): n is a, c, g, or t
  misc_feature (1067)..(1067): n is a, c, g, or t
  misc_feature (1069)..(1069): n is a, c, g, or t
  misc_feature (1075)..(1075): n is a, c, g, or t
  misc_feature (1077)..(1077): n is a, c, g, or t
  misc_feature (1080)..(1080): n is a, c, g, or t
  misc_feature (1085)..(1085): n is a, c, g, or t
  misc_feature (1108)..(1108): n is a, c, g, or t
  misc_feature (1135)..(1135): n is a, c, g, or t
  misc_feature (1146)..(1148): n is a, c, g, or t
  misc_feature (1151)..(1152): n is a, c, g, or t
  misc_feature (1157)..(1157): n is a, c, g, or t
  misc_feature (1159)..(1159): n is a, c, g, or t
  misc_feature (1162)..(1162): n is a, c, g, or t
  misc_feature (1164)..(1164): n is a, c, g, or t
  misc_feature (1169)..(1169): n is a, c, g, or t
  misc_feature (1172)..(1172): n is a, c, g, or t
  misc_feature (1183)..(1183): n is a, c, g, or t
  misc_feature (1206)..(1206): n is a, c, g, or t
gaattagaggaaaattactatgagaggatcgcatcaccatcaccatcacggatcctatttaggtgacactatagaatcgtcgacccacgcgtccgccggcggggctgggcctcgcaaagccggctcggcgagctctcccgacacccgagccggggaggaaaagcagcgactcctcgctcgcatccccgggagccgcactccagactggcccggtagtcaggggctcaggagcagatcccgaggcaggctttgctcagcctccgacgagggctggccctttggaaggcgccttcaacagccggaccagacaggccaccatgaccgagaattccacgtccgcccctgcggccaagcccaagcgggccaaggcctccaagaagtccacagaccaccccaagtattcagacatgatcgtggctgccatccaggccgagaagaaccgcgctggctcctcgcgccagtccattcagaagtatatcaagagccactacaaggtgggtgagaacgctgactcgcagatcaagttgtccatcaagcgcctggtcaccaccggtgtcctcaagcagaccaaaggggtgggggcctcggggtccttccggctagccaagagcgacgaacccaagaagtcagtggccttcaagaagaccaagaaggaaatcaagaaggtagccacgccaaagaaggcatccaagcccaagaaggctgcctccaaagccccaaccaagaaacccaaagccaccccggtcaagaaggccaagaanaagctggctgccacgcccaanaaagccaaaaaacccaagactgtcaaagccaagccggntcaanggcatccaagcccaaaaaaggccaaanccagtgaaacccaaaagcaaaagtccagtgccaaaangggcccgggcaaagaaaaanttgacaatgaaattctttttcttgcggaanactcccctcctgtcttcctattttttctgnaaaataattttncnccctttttttccccccttggaagctccaccaaccaccttttttgcccccctttntgttntgganttttaataaaaaaaacaggnantttggnanttntttcnaaaaatttaaaaaaaaaaatttnttttttttccttaaacccaatttttgngcaagggaaannnaannaaccnanttntnaatgnagnaaaaagggganctttaaaatttttgttttttgcna

SEQ ID NO: 208 - DNA, 1111 bp, Homo Sapiens
  misc_feature (781)..(781): n is a, c, g, or t
  misc_feature (807)..(807): n is a, c, g, or t
  misc_feature (820)..(820): n is a, c, g, or t
  misc_feature (841)..(841): n is a, c, g, or t
  misc_feature (854)..(854): n is a, c, g, or t
  misc_feature (913)..(913): n is a, c, g, or t
  misc_feature (934)..(934): n is a, c, g, or t
  misc_feature (948)..(948): n is a, c, g, or t
  misc_feature (969)..(969): n is a, c, g, or t
  misc_feature (992)..(992): n is a, c, g, or t
  misc_feature (995)..(996): n is a, c, g, or t
  misc_feature (1001)..(1001): n is a, c, g, or t
  misc_feature (1009)..(1009): n is a, c, g, or t
  misc_feature (1023)..(1023): n is a, c, g, or t
  misc_feature (1034)..(1034): n is a, c, g, or t
  misc_feature (1039)..(1040): n is a, c, g, or t
  misc_feature (1046)..(1046): n is a, c, g, or t
  misc_feature (1064)..(1064): n is a, c, g, or t
  misc_feature (1068)..(1068): n is a, c, g, or t
  misc_feature (1078)..(1078): n is a, c, g, or t
  misc_feature (1089)..(1089): n is a, c, g, or t
  misc_feature (1093)..(1097): n is a, c, g, or t
  misc_feature (1099)..(1111): n is a, c, g, or t
attagagaaattactatgagaggatcgcatcaccatcaccatcacggatcctatttaggtgacactatagaatcgtcgacccacgcgtccgaggacttgcagagccacatgatcaaacttcatggagcccccaagccccatgcatgccccacctgtgccaagtgcttcctgtctcggacagagctgcagctgcatgaagctttcaagcaccgtggtgagaagctgtttgtgtgtgaggagtgtgggcaccgggcctcgagccggaatggcctgcagatgcacatcaaggccaagcacaggaatgagaggccacacgtatgtgagttctgcagccacgccttcacccaaaaggccaatctcaacatgcacctgcgcacacacacgggtgagaagcccttccagtgccacctctgtggcaagaccttccgaacccaagccagcctggacaagcacaaccgcacccacaccggggaaaggcccttcagttgcgagttctgtgaacagcgcttcactgagaaggggcccctcctgaggcacgtggccagccgccatcaggagggccggccccacttctgccagatatgcggcaagaccttcaaagccgtggagcaactgcgtgtgcacgtcagacggcacaagggggtgaggaagtttgagtgcaccgagtgtggctacaagtttacccgacaggcccacctgcggaggcacatggagatccacgaccgggtagagaactacaacccgcggcagcgcaagctccgcaacctgatcatcgaggacnagaagatggtggtggtggcgctgcanccgccctgcaaanctggaggtgggctcggcggangtcattgtggaantccctggcccagggcgggcctggcctcccagctcccgggccaaaaaactgtgtgcaaangaaaagcttcaccgggccaangttgtccttggaanccctccctcattaatcaaagntgctgttccccaaggaattgtgnaannataancccatttntgggccccaaaaanccccacttggnccccnncccccnaaaaaaacccgggggggntttngaaattttcnaaaaaaaaaanaaannnnnannnnnnnnnnnnn

SEQ ID NO: 209 - DNA, 1227 bp, Homo Sapiens
  misc_feature (966)..(966): n is a, c, g, or t
  misc_feature (968)..(968): n is a, c, g, or t
  misc_feature (970)..(970): n is a, c, g, or t
  misc_feature (975)..(975): n is a, c, g, or t
  misc_feature (977)..(977): n is a, c, g, or t
  misc_feature (1007)..(1007): n is a, c, g, or t
  misc_feature (1010)..(1010): n is a, c, g, or t
  misc_feature (1017)..(1017): n is a, c, g, or t
  misc_feature (1031)..(1031): n is a, c, g, or t
  misc_feature (1065)..(1065): n is a, c, g, or t
  misc_feature (1071)..(1071): n is a, c, g, or t
  misc_feature (1089)..(1089): n is a, c, g, or t
  misc_feature (1094)..(1094): n is a, c, g, or t
  misc_feature (1100)..(1100): n is a, c, g, or t
  misc_feature (1111)..(1111): n is a, c, g, or t
  misc_feature (1113)..(1113): n is a, c, g, or t
  misc_feature (1115)..(1115): n is a, c, g, or t
  misc_feature (1132)..(1132): n is a, c, g, or t
  misc_feature (1134)..(1134): n is a, c, g, or t
  misc_feature (1153)..(1153): n is a, c, g, or t
  misc_feature (1168)..(1168): n is a, c, g, or t
  misc_feature (1170)..(1170): n is a, c, g, or t
  misc_feature (1182)..(1183): n is a, c, g, or t
  misc_feature (1191)..(1191): n is a, c, g, or t
  misc_feature (1201)..(1201): n is a, c, g, or t
  misc_feature (1204)..(1204): n is a, c, g, or t
  misc_feature (1209)..(1209): n is a, c, g, or t
  misc_feature (1214)..(1215): n is a, c, g, or t
  misc_feature (1220)..(1220): n is a, c, g, or t
  misc_feature (1225)..(1225): n is a, c, g, or t
  misc_feature (1227)..(1227): n is a, c, g, or t
atagagaaattactatgagaggatcgcatcaccatcaccatcacggatcctatttaggtgacactatagaatcgtcgacccacgcgtccggccagaaactccctccattttcttatgcttatacggaactggaagctattatgtatgcccttggagtgggagcgtcaatcaaggatccaaaagatttgaaatttatttatgaaggaagttctgatttctcctgtttgcccaccttcggagttatcataggtcagaaatctatgatgggtggaggattagcagaaattcctggactttcaatcaactttgcaaaggttcttcatggagagcagtacttagagttatataaaccacttcccagagcaggaaaattaaaatgtgaagcagttgttgctgatgtcctagataaaggatccggtgtagtgattattatggatgtctattcttattctgagaaggaacttatatgccacaatcagttctctctctttcttgttggctctggaggctttggtggaaaacggacatcagacaaagtcaaggtagctgtagccatacctaatagacctcctgatgctgtacttacagataccacctctcttaatcaggctgctttgtaccgcctcagtggagactggaatcccttacacattgatcctaactttgctagtctagcaggttttgacaagcccatattacatggattatgtacatttggattttctgccaggcgtgtgttacagcagtttgcagataatgatgtgtcaagattcaaggcagttaaggctcgttttgcaaaaccagtatatccaggacaaactctacaaactgagatgtggaaggaaggaaacagaattcattttcaaaccaaggtccaagaaactggagacattgtcatttcaaatgcatatgtggatcttgcaccaacatctggtacttcagctaaaacaccctctgagggcgggnancntccanantacctttgtatttgaggaaataggaccccnccnaaagganattgggcctgaggnggtgaaaaaagtaaatgctgtatttgagtggcanaaaccnaaggcggaaaaattgggnctaanggacantgacctgaaangngntctggaaaatgtaccangncccgcaaagggctgctgancaacaatccaacttncnaaaaaaaattcnngggggggnccgggcaacntgnccccnaaggnnttttntggcngn

SEQ ID NO: 210 - DNA, 1209 bp, Homo Sapiens
  misc_feature (914)..(914): n is a, c, g, or t
  misc_feature (916)..(916): n is a, c, g, or t
  misc_feature (929)..(929): n is a, c, g, or t
  misc_feature (940)..(940): n is a, c, g, or t
  misc_feature (962)..(962): n is a, c, g, or t
  misc_feature (966)..(966): n is a, c, g, or t
  misc_feature (974)..(974): n is a, c, g, or t
  misc_feature (977)..(977): n is a, c, g, or t
  misc_feature (979)..(980): n is a, c, g, or t
  misc_feature (1000)..(1000): n is a, c, g, or t
  misc_feature (1003)..(1003): n is a, c, g, or t
  misc_feature (1008)..(1008): n is a, c, g, or t
  misc_feature (1015)..(1015): n is a, c, g, or t
  misc_feature (1024)..(1024): n is a, c, g, or t
  misc_feature (1041)..(1041): n is a, c, g, or t
  misc_feature (1043)..(1044): n is a, c, g, or t
  misc_feature (1068)..(1068): n is a, c, g, or t
  misc_feature (1071)..(1071): n is a, c, g, or t
  misc_feature (1087)..(1087): n is a, c, g, or t
  misc_feature (1099)..(1099): n is a, c, g, or t
  misc_feature (1105)..(1105): n is a, c, g, or t
  misc_feature (1118)..(1118): n is a, c, g, or t
  misc_feature (1133)..(1133): n is a, c, g, or t
  misc_feature (1135)..(1135): n is a, c, g, or t
  misc_feature (1141)..(1141): n is a, c, g, or t
  misc_feature (1170)..(1171): n is a, c, g, or t
  misc_feature (1173)..(1173): n is a, c, g, or t
  misc_feature (1177)..(1177): n is a, c, g, or t
  misc_feature (1181)..(1181): n is a, c, g, or t
  misc_feature (1191)..(1191): n is a, c, g, or t
  misc_feature (1194)..(1194): n is a, c, g, or t
  misc_feature (1200)..(1200): n is a, c, g, or t
  misc_feature (1202)..(1202): n is a, c, g, or t
  misc_feature (1206)..(1207): n is a, c, g, or t
  misc_feature (1209)..(1209): n is a, c, g, or t
caatagagaaattactatgagaggatcgcatcaccatcaccatcacggatcctatttaggtgacactatagaatcgtcgacccacgcgttccggcacaaggtacgtggtgatatcaacgtgctcttgtgcggagaccctggcacagcgaagtcgcagtttctcaagtatattgagaaagtgtccagccgagccatcttcaccactggccagggggcgtcggctgtgggcctcacggcgtatgtccagcggcaccctgtcagcagggagtggaccttggaggctggggccctggttctggctgaccgaggagtgtgtctcattgatgaatttgacaagatgaatgaccaggacagaaccagcatccatgaggccatggagcaacagagcatctccatctcgaaggctggcatcgtcacctccctgcaggctcgctgcacggtcattgctgccgccaaccccataggagggcgctacgacccctcgctgactttctctgagaacgtggacctcacagagcccatcatctcacgctttgacatcctgtgtgtggtgagggacaccgtggacccagtccaggacgagatgctggcccgcttcgtggtgggcagccacgtcagacaccaccccagcaacaaggaggaggaggggctggccaatggcagcgctgctgagcccgccatgcccaacacgtatggcgtggagcccctgccccaggaggtcctgaagaagtacatcatctacgccaaggagagggtccacccgaagctcaaccagatggaccaggacaaggtggccaagatgtacagtgacctgaggaagaatctatggcgacaggcagcatccccattacggtgcggcacatcgagtccatgatccgcatggcggaagcccacgcgcgcatccatctgcgggnantatgtgatcgaanacgacgtcaanatggccatccgcgtgatgctgnagancttcatanacncnncaaaaattcaccgtcatgcncancatgngcaaaanttttgcccnctacctttcattccggngnnaaacaatgaacctgttgctcttcntantgaaacaattaatggnaaaacaaggaanaatcanccccaaccctttngggcccaaaagaaantntttgangtcccgaaaaaaaattgggggaaaaggtnntnaaanaaantccaaacctntgntttttntnaagnnan

SEQ ID NO: 211 - DNA, 1128 bp, Homo Sapiens
  misc_feature (754)..(754): n is a, c, g, or t
  misc_feature (772)..(772): n is a, c, g, or t
  misc_feature (775)..(775): n is a, c, g, or t
  misc_feature (798)..(798): n is a, c, g, or t
  misc_feature (800)..(800): n is a, c, g, or t
  misc_feature (858)..(858): n is a, c, g, or t
  misc_feature (885)..(885): n is a, c, g, or t
  misc_feature (908)..(908): n is a, c, g, or t
  misc_feature (910)..(910): n is a, c, g, or t
  misc_feature (925)..(925): n is a, c, g, or t
  misc_feature (935)..(936): n is a, c, g, or t
  misc_feature (951)..(951): n is a, c, g, or t
  misc_feature (970)..(970): n is a, c, g, or t
  misc_feature (973)..(973): n is a, c, g, or t
  misc_feature (1026)..(1026): n is a, c, g, or t
  misc_feature (1029)..(1029): n is a, c, g, or t
  misc_feature (1031)..(1031): n is a, c, g, or t
  misc_feature (1042)..(1042): n is a, c, g, or t
  misc_feature (1054)..(1054): n is a, c, g, or t
  misc_feature (1060)..(1060): n is a, c, g, or t
  misc_feature (1062)..(1062): n is a, c, g, or t
  misc_feature (1068)..(1068): n is a, c, g, or t
  misc_feature (1083)..(1083): n is a, c, g, or t
  misc_feature (1087)..(1087): n is a, c, g, or t
  misc_feature (1089)..(1090): n is a, c, g, or t
  misc_feature (1097)..(1097): n is a, c, g, or t
  misc_feature (1099)..(1099): n is a, c, g, or t
  misc_feature (1110)..(1110): n is a, c, g, or t
  misc_feature (1125)..(1125): n is a, c, g, or t
tagagaaattactatgagaggatcgcatcaccatcaccatcacggatcctatttaggtgacactatagaatcgtcgacccacgcgtccgctcgctgtgtggtatctgaggctggcaaagctttagacatgtcctatgatcacaaaccagaggatgaagtagaactagcacgcatcaagaatgctggtggcaaggtcaccatggatgggcgagtcaacgggggcctcaacctctccagagccattggggaccacttctataagagaaacaagaacctgccacctgaggaacagatgatttcagcccttcctgacatcaaggtgctgactctcactgacgaccatgaattcatggtcattgcctgtgatggcatctggaatgtgatgagcagccaggaagttgtagatttcattcaatcaaagatcagccagcgtgatgaaaatggggagcttcggttattgtcatccattgtggaagagctgctggatcagtgcctggcaccagacacttctggggatggtacagggtgtgacaacatgacctgcatcatcatttgcttcaagccccgaaacacagcagagctccagccagagagtggcaagcgaaaactagaggaggtgctctctactgagggggctgaagaaaatggcaacagcgacaagaagaagaaggccaagcgagactagcagtcatccagacccctgcccacctagactgttttctgagccctccggacctgagactgagttttgtcntttttcctttagccttancantgggtatgaagtgtgcagggggnanctgggtggtttcactccgccccattccaaaaaagggctctccctccacactgcagccngggagcctctgctgtcctttccaaccncctctgctcctcggggctcatcncnggttctgtggcctgngctctgttgnnttgaaaggaaagaantggccggttctggtttttnacncccgggaaacttttatttaaaggacatttcttttttttatttggccggctccnttngnccccccggccncttggccccccncctccntntttttnaacccttttcaattnaaancnnttttttncnaaaaaaaaggncccaaaccctatttnctt

SEQ ID NO: 212 - DNA, 754 bp, Homo Sapiens
  misc_feature (1)..(1): n is a, c, g, or t
nttagagaaattactatgagaggatcgcatcaccatcaccatcacggatcctatttaggtgacactatagaatcgtcgacccacgcgtccgcccacgcgtccgagaagaggctcgcctctagtgtcctccgctgtggcaagaagaaggtctggttagaccccaatgagaccaatgaaatcgccaatgccaactcccgtcagcagatccggaagctcatcaaagatgggctgatcatccgcaagcctgtgacggtccattcccgggctcgatgccggaaaaacaccttggcccgccggaagggcaggcacatgggcataggtaagcggaagggtacagccaatgcccgaatgccagagaaggtcacatggatgaggagaatgaggattttgcgccggctgctcagaagataccgtgaatctaagaagatcgatcgccacatgtatcacagcctgtacctgaaggtgaaggggaatgtgttcaaaaacaagcggattctcatggaacacatccacaagctgaaggcagacaaggcccgcaagaagctcctggctgaccaggctgaggcccgcaggtctaagaccaaggaagcacgcaagcgccgtgaagagcgcctccaggccaagaaggaggagatcatcaagactttatccaaggaggaagagaccaagaaataaaacctcccactttgtctgtacatactggcctctgtgattacatagatcagccattaaaataaaacaagccttaatctgc

SEQ ID NO: 213 - DNA, 1107 bp, Homo Sapiens
  misc_feature (847)..(847): n is a, c, g, or t
  misc_feature (853)..(853): n is a, c, g, or t
  misc_feature (865)..(865): n is a, c, g, or t
  misc_feature (868)..(868): n is a, c, g, or t
  misc_feature (871)..(871): n is a, c, g, or t
  misc_feature (876)..(876): n is a, c, g, or t
  misc_feature (891)..(891): n is a, c, g, or t
  misc_feature (899)..(899): n is a, c, g, or t
  misc_feature (909)..(909): n is a, c, g, or t
  misc_feature (916)..(916): n is a, c, g, or t
  misc_feature (925)..(925): n is a, c, g, or t
  misc_feature (942)..(942): n is a, c, g, or t
  misc_feature (948)..(948): n is a, c, g, or t
  misc_feature (950)..(950): n is a, c, g, or t
  misc_feature (952)..(952): n is a, c, g, or t
  misc_feature (966)..(966): n is a, c, g, or t
  misc_feature (972)..(972): n is a, c, g, or t
  misc_feature (975)..(975): n is a, c, g, or t
  misc_feature (977)..(977): n is a, c, g, or t
  misc_feature (979)..(979): n is a, c, g, or t
  misc_feature (987)..(987): n is a, c, g, or t
  misc_feature (991)..(991): n is a, c, g, or t
  misc_feature (993)..(993): n is a, c, g, or t
  misc_feature (1006)..(1006): n is a, c, g, or t
  misc_feature (1011)..(1012): n is a, c, g, or t
  misc_feature (1017)..(1017): n is a, c, g, or t
  misc_feature (1035)..(1035): n is a, c, g, or t
  misc_feature (1046)..(1046): n is a, c, g, or t
  misc_feature (1052)..(1052): n is a, c, g, or t
  misc_feature (1061)..(1061): n is a, c, g, or t
  misc_feature (1066)..(1066): n is a, c, g, or t
  misc_feature (1068)..(1069): n is a, c, g, or t
  misc_feature (1078)..(1079): n is a, c, g, or t
  misc_feature (1082)..(1082): n is a, c, g, or t
  misc_feature (1085)..(1085): n is a, c, g, or t
  misc_feature (1091)..(1091): n is a, c, g, or t
gagaaattactatgagaggatcgcatcaccatcaccatcacggatcctatttaggtgacactatagaatcgtcgacccacgcgtccgctggagagaaaacttacacacagcgatgtcggttgtttgttgggaatctacctgctgatatcacggaggatgaattcaaaagactatttgctaaatatggagaaccaggagaagtttttatcaacaaaggcaaaggattcggatttattaagcttgaatctagagctttggctgaaattgccaaagccgaactggatgatacacccatgagaggtagacagcttcgagttcgctttgccacacatgctgctgccctttctgttcgtaatctttcaccttatgtttccaatgaactgttggaagaagcctttagccaatttggtcctattgaaagggctgttgtaatagtggatgatcgtggaagatctacagggaaaggcattgttgaatttgcttctaagccagcagcaagaaaggcatttgaacgatgcagtgaaggtgttttcttactgacgacaactcctcgtccagtcattgtggaaccacttgaacaactagatgatgaagatggtcttcctgaaaaacttgcccagaagaatccaatgtatcaaaaggagagagaaacccctcctcgttttgcccagcatggcacgtttgagtacgaatattctcagcgatggaagtctttggatgaaatggaaaaacagcaaagggaacaagttgaaaaaaacatgaaagatgcaaaagacaaattggaaagtgaaatggaagatgcctatcatgaacatcaggcaaatcttttgcgccaagatctgatganacgacnggaagaattaanacncanggaanaacttcccaatcaanaaatgcanaaccgtaaanaaatgcnattgaggcnagaggagaacgacgtanaaaaangnanaaatgatgatcccnccacgnganangnaaaacaangagncnccaaaaaaggaanttacnnccaangggctactggatcccggnaaaaaactgcnatgggnggcgaagancatgnanngggaatccnnggntcngagccnaaattccccccagagg

SEQ ID NO: 214 - DNA, 1357 bp, Homo Sapiens
  misc_feature (1)..(1): n is a, c, g, or t
  misc_feature (904)..(904): n is a, c, g, or t
  misc_feature (929)..(929): n is a, c, g, or t
  misc_feature (949)..(949): n is a, c, g, or t
  misc_feature (976)..(976): n is a, c, g, or t
  misc_feature (980)..(980): n is a, c, g, or t
  misc_feature (1006)..(1006): n is a, c, g, or t
  misc_feature (1040)..(1040): n is a, c, g, or t
  misc_feature (1053)..(1053): n is a, c, g, or t
  misc_feature (1070)..(1070): n is a, c, g, or t
  misc_feature (1074)..(1074): n is a, c, g, or t
  misc_feature (1088)..(1088): n is a, c, g, or t
  misc_feature (1093)..(1093): n is a, c, g, or t
  misc_feature (1101)..(1101): n is a, c, g, or t
  misc_feature (1107)..(1107): n is a, c, g, or t
  misc_feature (1122)..(1122): n is a, c, g, or t
  misc_feature (1142)..(1142): n is a, c, g, or t
  misc_feature (1174)..(1174): n is a, c, g, or t
  misc_feature (1179)..(1179): n is a, c, g, or t
  misc_feature (1186)..(1186): n is a, c, g, or t
  misc_feature (1194)..(1194): n is a, c, g, or t
  misc_feature (1199)..(1199): n is a, c, g, or t
  misc_feature (1201)..(1201): n is a, c, g, or t
  misc_feature (1205)..(1205): n is a, c, g, or t
  misc_feature (1215)..(1215): n is a, c, g, or t
  misc_feature (1217)..(1217): n is a, c, g, or t
  misc_feature (1236)..(1237): n is a, c, g, or t
  misc_feature (1242)..(1242): n is a, c, g, or t
  misc_feature (1246)..(1246): n is a, c, g, or t
  misc_feature (1250)..(1250): n is a, c, g, or t
  misc_feature (1264)..(1265): n is a, c, g, or t
  misc_feature (1270)..(1271): n is a, c, g, or t
  misc_feature (1278)..(1278): n is a, c, g, or t
  misc_feature (1291)..(1291): n is a, c, g, or t
  misc_feature (1297)..(1297): n is a, c, g, or t
  misc_feature (1306)..(1307): n is a, c, g, or t
  misc_feature (1317)..(1318): n is a, c, g, or t
  misc_feature (1320)..(1320): n is a, c, g, or t
  misc_feature (1337)..(1337): n is a, c, g, or t
  misc_feature (1339)..(1340): n is a, c, g, or t
  misc_feature (1343)..(1343): n is a, c, g, or t
  misc_feature (1349)..(1349): n is a, c, g, or t
  misc_feature (1353)..(1353): n is a, c, g, or t
naatagagaaattactatgagaggatcgcatcaccatcaccatcacggatcctatttaggtgacactatagaatcgtcgacccacgcgtccggtggcgtagacgagttaagtcctggtctgcgtggaggtcgacgactccgtcgcagactacggacctgtctgggtctcagccgccaaagaccccgtccggaagtactagccggacatcatgagtggctgtcgggtattcatcgggagactaaatccagcggccagggagaaggacgtggaaagattcttcaagggatatggacggataagagatattgatctgaaaagaggctttggttttgtggaatttgaggatccaagggatgcagatgatgctgtgtatgagcttgatggaaaagaactctgtagtgaaagggttactattgaacatgctagggctcggtcacgaggtggaagaggtagaggacgatactctgaccgttttagtagtcgcagacctcgaaatgatagacgaaatgctccacctgtaagaacagaaaatcgtcttatagttgagaatttatcctcaagagtcagctggcaggatctcaaagatttcatgagacaagctggggaagtaacgtttgcggatgcacaccgacctaaattaaatgaaggggtggttgagtttgcctcttatggtgacttaaagaatgctattgaaaaactttctggaaaggaaataaatgggagaaaaataaaattaattgaaggcagcaaaaggcacagtaggtcaagaagcaggtctcgatcccggaccagaagttcctctaggtctcgtagccgatcccgttcccgtagtcgcaaatcttacagccggtcaagaagcaggagcaggagccggagccggagcaagtcccgttctgttagtangtctcccgtgcctgaaaagagccanaaacgtggttcttcaagtanatctaagtctccagcatctgtggatcnccanaggtcccggtcccgatcaaggtccanatcagttgacagtggcaataaactgtaataactngccctgggggccnttttttaaaaacaaaancccnaaaattcccaaccntactngctaaaantctggnaatatgtgcttttcngggggggtggaatttgaaangggggttgggttggcctgaattctttttaaantggancccccanggggtgtngaaancnaatngtattaaagncntttgaaaaccctccccccnnttttnggangccngaaaaaaaatttgnntattnncaaaccntttttaaaaaaanaaattnttttttttnnaaaaaaattnnanttttttttgtttaaaangnnttncaaaantttngccc

SEQ ID NO: 215 - DNA, 985 bp, Homo Sapiens
  misc_feature (820)..(820): n is a, c, g, or t
  misc_feature (823)..(823): n is a, c, g, or t
  misc_feature (828)..(828): n is a, c, g, or t
  misc_feature (854)..(854): n is a, c, g, or t
  misc_feature (862)..(862): n is a, c, g, or t
  misc_feature (865)..(865): n is a, c, g, or t
  misc_feature (884)..(884): n is a, c, g, or t
  misc_feature (890)..(890): n is a, c, g, or t
  misc_feature (913)..(913): n is a, c, g, or t
  misc_feature (916)..(916): n is a, c, g, or t
  misc_feature (924)..(924): n is a, c, g, or t
  misc_feature (929)..(929): n is a, c, g, or t
  misc_feature (935)..(935): n is a, c, g, or t
  misc_feature (942)..(942): n is a, c, g, or t
  misc_feature (945)..(945): n is a, c, g, or t
  misc_feature (952)..(952): n is a, c, g, or t
  misc_feature (957)..(957): n is a, c, g, or t
  misc_feature (961)..(961): n is a, c, g, or t
  misc_feature (965)..(965): n is a, c, g, or t
  misc_feature (967)..(968): n is a, c, g, or t
  misc_feature (971)..(971): n is a, c, g, or t
  misc_feature (974)..(974): n is a, c, g, or t
  misc_feature (980)..(980): n is a, c, g, or t
  misc_feature (982)..(982): n is a, c, g, or t
  misc_feature (984)..(984): n is a, c, g, or t
tatagagaaattactatgagaggatcgcatcaccatcaccatcacggatcctatttaggtgacactatagaatcgtcgacccacgcgtccgctgtgcccgaggcgggcgagccttgccccagggtacctgctaccccccgaaggatgagcgatccccctctgagcaccatgcccaccgcacccggcctccggaaacccccttgcttccgggagagtgccagccccagcccggagccctggacccctggccacggggcctgctccacttccagtgctgccatcatggccactgccacctccagaaactgtgacaaactcaagtccttccacctgtccccccgaggaccacccacatctgagcccccacctgtgccagccaacaagcccaagttcctgaagatagctgaagaggaccccccaagggaggcagccatgcccggactctttgtgccccccgtggctccccggcctcctgcgctgaagctgccagtgcctgaggccatggcgcggcccgcagtcctgcccaggccagagaagccgcagctcccgcacctccagcgatcaccccccgatgggcagagtttcaggagcttctcctttgaaaagccccggcaaccctcacaggctgacactggcggggacgactcggacgaggactatgagaaggtgccactgcccaactcggtcttcgtcaacaccacggagtcctgcgaagtggaaaggttgttcaaggctacaagcccccggggagagccccaggatggactctactgcatccggaactcctctaccaagtcggggaaggtcctggttgtgtggnacnaaacntctaacaaagtgaggaactatcgcantttttganaangactctaatttttacctgnagggcnaaggtcctgtttgtgaatgtggncancatggtgnaacantaccanacccacntgntgcccanccacnaaanctgntnntgnggnaccctnangnt

SEQ ID NO: 216 - DNA, 1282 bp, Homo Sapiens
  misc_feature (1)..(8): n is a, c, g, or t
  misc_feature (821)..(821): n is a, c, g, or t
  misc_feature (833)..(833): n is a, c, g, or t
  misc_feature (893)..(893): n is a, c, g, or t
  misc_feature (922)..(922): n is a, c, g, or t
  misc_feature (941)..(941): n is a, c, g, or t
  misc_feature (956)..(956): n is a, c, g, or t
  misc_feature (959)..(959): n is a, c, g, or t
  misc_feature (968)..(968): n is a, c, g, or t
  misc_feature (1004)..(1004): n is a, c, g, or t
  misc_feature (1015)..(1015): n is a, c, g, or t
  misc_feature (1020)..(1020): n is a, c, g, or t
  misc_feature (1024)..(1024): n is a, c, g, or t
  misc_feature (1028)..(1028): n is a, c, g, or t
  misc_feature (1038)..(1038): n is a, c, g, or t
  misc_feature (1056)..(1056): n is a, c, g, or t
  misc_feature (1062)..(1062): n is a, c, g, or t
  misc_feature (1071)..(1072): n is a, c, g, or t
  misc_feature (1092)..(1092): n is a, c, g, or t
  misc_feature (1120)..(1120): n is a, c, g, or t
  misc_feature (1126)..(1126): n is a, c, g, or t
  misc_feature (1142)..(1142): n is a, c, g, or t
  misc_feature (1146)..(1146): n is a, c, g, or t
  misc_feature (1148)..(1148): n is a, c, g, or t
  misc_feature (1159)..(1159): n is a, c, g, or t
  misc_feature (1165)..(1165): n is a, c, g, or t
  misc_feature (1167)..(1167): n is a, c, g, or t
  misc_feature (1184)..(1184): n is a, c, g, or t
  misc_feature (1186)..(1186): n is a, c, g, or t
  misc_feature (1203)..(1204): n is a, c, g, or t
  misc_feature (1206)..(1206): n is a, c, g, or t
  misc_feature (1211)..(1211): n is a, c, g, or t
  misc_feature (1227)..(1228): n is a, c, g, or t
  misc_feature (1231)..(1231): n is a, c, g, or t
  misc_feature (1237)..(1237): n is a, c, g, or t
  misc_feature (1250)..(1250): n is a, c, g, or t
  misc_feature (1255)..(1255): n is a, c, g, or t
  misc_feature (1258)..(1258): n is a, c, g, or t
  misc_feature (1262)..(1262): n is a, c, g, or t
  misc_feature (1266)..(1266): n is a, c, g, or t
  misc_feature (1268)..(1268): n is a, c, g, or t
  misc_feature (1270)..(1271): n is a, c, g, or t
  misc_feature (1276)..(1276): n is a, c, g, or t
nnnnnnnnaaagagaaaattactatgagaggatcgcatcaccatcaccatcacggatcctatttaggtgacactatagaatcgtcgacccacgcgtccgcccacgcgtccgcccacgcgtccggtggacctggaagccttcagcgagtttaccaagatcatcaccccggccatcacccgtgtggtggactttgccaaaaaactgcccatgttctccgagctgccttgcgaagaccagatcatcctcctgaaggggtgctgcatggagatcatgtccctgcgggcggctgtccgctacgaccctgagagcgacaccctgacgctgagtggggagatggctgtcaagcgggagcagctcaagaatggcggcctgggcgtagtctccgacgccatctttgaactgggcaagtcactctctgcctttaacctggatgacacggaagtggctctgctgcaggctgtgctgctaatgtcaacagaccgctcgggcctgctgtgtgtggacaagatcgagaagagtcaggaggcgtacctgctggcgttcgagcactacgtcaaccaccgcaaacacaacattccgcacttctggcccaagctgctgatgaaggagagagaagtgcagagttcgattctgtacaagggggcagcggcagaaggccggccgggcgggtcactgggcgtccacccggaaggacagcagcttctcggaatgcatgttgttcagggtccgcaggtccggcagcttgagcagcagcttggtgaagcgggaagtctccaagggccggttcttcagcaccagagccccgaaagagcccgcagcancgtctcctgganctgctccaccgaagcggaattctccatgcccgagcggtctgtggggaaagacgacagcantgaaggcggactccccgagctcctctgangaagaaccggaggtctgcnaagaaacctggcagncantgcagcccnctccctgaaacccccccaaaaagcccaatggggaangaaaaaagaantgccnatancttntcccaggccncctgccccaaaaacaagnaaggtncctgaaaannttgggaacctgggcctcaancagggctgggccccttcccattcccgtnaaaaanacctttccctttcctnaaangnccaaaaatggnccaaancnccctggcttttttggcngngaaaattccccctcccnngnaaaancccttccccctttttnntgncctggnaaaattttaattntcctnttnaggncccnantnnaaagnttaacc

SEQ ID NO: 217 - DNA, 1131 bp, Homo Sapiens
  misc_feature (788)..(788): n is a, c, g, or t
  misc_feature (808)..(808): n is a, c, g, or t
  misc_feature (834)..(834): n is a, c, g, or t
  misc_feature (869)..(869): n is a, c, g, or t
  misc_feature (880)..(880): n is a, c, g, or t
  misc_feature (882)..(882): n is a, c, g, or t
  misc_feature (890)..(890): n is a, c, g, or t
  misc_feature (897)..(897): n is a, c, g, or t
  misc_feature (908)..(908): n is a, c, g, or t
  misc_feature (928)..(928): n is a, c, g, or t
  misc_feature (932)..(932): n is a, c, g, or t
  misc_feature (942)..(943): n is a, c, g, or t
  misc_feature (952)..(952): n is a, c, g, or t
  misc_feature (958)..(958): n is a, c, g, or t
  misc_feature (964)..(964): n is a, c, g, or t
  misc_feature (967)..(967): n is a, c, g, or t
  misc_feature (969)..(969): n is a, c, g, or t
  misc_feature (977)..(977): n is a, c, g, or t
  misc_feature (982)..(982): n is a, c, g, or t
  misc_feature (987)..(987): n is a, c, g, or t
  misc_feature (1012)..(1012): n is a, c, g, or t
  misc_feature (1014)..(1014): n is a, c, g, or t
  misc_feature (1016)..(1016): n is a, c, g, or t
  misc_feature (1034)..(1034): n is a, c, g, or t
  misc_feature (1048)..(1048): n is a, c, g, or t
  misc_feature (1050)..(1050): n is a, c, g, or t
  misc_feature (1055)..(1055): n is a, c, g, or t
  misc_feature (1065)..(1065): n is a, c, g, or t
  misc_feature (1074)..(1074): n is a, c, g, or t
  misc_feature (1079)..(1079): n is a, c, g, or t
  misc_feature (1081)..(1081): n is a, c, g, or t
  misc_feature (1083)..(1083): n is a, c, g, or t
  misc_feature (1097)..(1098): n is a, c, g, or t
  misc_feature (1104)..(1104): n is a, c, g, or t
  misc_feature (1106)..(1107): n is a, c, g, or t
  misc_feature (1109)..(1109): n is a, c, g, or t
  misc_feature (1121)..(1121): n is a, c, g, or t
  misc_feature (1129)..(1129): n is a, c, g, or t
aatagagaaattaactatgagaggatcgcatcaccatcaccatcacggatcctatttaggtgacactatagaatcgtcgacccacgcgtccggcacctcctcccgtcaggcgctttctcggacgccttgcccagcgggccgcccgaccccctgcaccatggaccccgctcgccccctggggctgtcgattctgctgcttttcctgacggaggctgcactgggcgatgctgctcaggagccaacaggaaataacgcggagatctgtctcctgcccctagactacggaccctgccgggccctacttctccgttactactacgacaggtacacgcagagctgccgccagttcctgtacgggggctgcgagggcaacgccaacaatttctacacctgggaggcttgcgacgatgcttgctggaggatagaaaaagttcccaaagtttgccggctgcaagtgagtgtggacgaccagtgtgaggggtccacagaaaagtatttctttaatctaagttccatgacatgtgaaaaattcttttccggtgggtgtcaccggaaccggattgagaacaggtttccagatgaagctacttgtatgggcttctgcgcaccaaagaaaattccatcattttgctacagtccaaaagatgagggactgtgctctgccaatgtgactcgctattattttaatccaagatacagaacctgtgatgctttcacctatactggctgtggagggaatgacaataactttgttagcagggaggattgcaaacgtgcatgtgcaaaanctttgaaaaagaaaaagaanatgccaaagcttcgctttgccagtanaatccggaaaattcggaaaaaagcaattttaaaanattcttaatangncatcttgntttggcntttatggcctnatttgccctttaagggttgnaacngaaaaataannatgaaagcntgaagnaaaacnaantntttggggnatttntttcncccagtttttttattaataacaagncncntttttaaaaaaatttggnaattttttttaaananaaaanaacctgctantcaaaatgngaaancnanccatttttaaattnnggttcnanntnttttgggaaaantaaatttntt

SEQ ID NO: 218 - DNA, 1280 bp, Homo Sapiens
  misc_feature (2)..(2): n is a, c, g, or t
  misc_feature (876)..(876): n is a, c, g, or t
  misc_feature (944)..(944): n is a, c, g, or t
  misc_feature (977)..(977): n is a, c, g, or t
  misc_feature (982)..(982): n is a, c, g, or t
  misc_feature (986)..(987): n is a, c, g, or t
  misc_feature (1006)..(1006): n is a, c, g, or t
  misc_feature (1027)..(1027): n is a, c, g, or t
  misc_feature (1048)..(1048): n is a, c, g, or t
  misc_feature (1058)..(1058): n is a, c, g, or t
  misc_feature (1087)..(1088): n is a, c, g, or t
  misc_feature (1096)..(1096): n is a, c, g, or t
  misc_feature (1098)..(1098): n is a, c, g, or t
  misc_feature (1111)..(1111): n is a, c, g, or t
  misc_feature (1117)..(1117): n is a, c, g, or t
  misc_feature (1124)..(1124): n is a, c, g, or t
  misc_feature (1133)..(1133): n is a, c, g, or t
  misc_feature (1136)..(1137): n is a, c, g, or t
  misc_feature (1142)..(1142): n is a, c, g, or t
  misc_feature (1144)..(1144): n is a, c, g, or t
  misc_feature (1160)..(1161): n is a, c, g, or t
  misc_feature (1164)..(1164): n is a, c, g, or t
  misc_feature (1166)..(1166): n is a, c, g, or t
  misc_feature (1172)..(1172): n is a, c, g, or t
  misc_feature (1177)..(1177): n is a, c, g, or t
  misc_feature (1183)..(1183): n is a, c, g, or t
  misc_feature (1187)..(1187): n is a, c, g, or t
  misc_feature (1189)..(1189): n is a, c, g, or t
  misc_feature (1191)..(1191): n is a, c, g, or t
  misc_feature (1208)..(1208): n is a, c, g, or t
  misc_feature (1225)..(1225): n is a, c, g, or t
  misc_feature (1228)..(1228): n is a, c, g, or t
  misc_feature (1256)..(1256): n is a, c, g, or t
  misc_feature (1258)..(1258): n is a, c, g, or t
  misc_feature (1263)..(1263): n is a, c, g, or t
  misc_feature (1272)..(1272): n is a, c, g, or t
  misc_feature (1278)..(1278): n is a, c, g, or t
antagagaaattactatgagaggatcgcatcaccatcaccatcacggatcctatttaggtgacactatagaatcgtcgacccacgcgtccgcccacgcgtccggcatcacagatggcaacatgccagggaccaggcctgccagccgccggatgcagcaggctggagctgtctccccctttgggatgctgggaatgtcgggtggtttcatggacatgtttgggatgatgaatgacatgattggaaacatggaacacatgacagctggaggcaattgccagaccttctcatcttccactgtcatctcctactccaatacgggtgatggtgcccccaaggtctaccaagagacatcagagatgcgctcggcaccaggcgggatccgggagacacggaggactgttcgggattcagacagtggactggagcagatgtccattgggcatcacatccgggacagggctcacatcctccagcgctcccgaaaccatcgcacgggggaccaggaggagcggcaggactatatcaacctggatgagagtgaggccgcagcgtttgatgacgagtggcggcgggagacctcccgattccggcagcagcgtcccctggagtttcggcggcttgagtcctcaggggctgggggacgaagggcggaggggcctccccgcctggccatccagggacctgaggactccccttcccgacagtcccgccgctatgactggtgagggccccgggccctcagcctctcttgtacaggctgagaggctgaaaaatcatcccctgaataactttttcctctcgattcccatccccaattttaatattaaattaacaggcaagccggcccccacctctccctggggggtctcaggganaacctttcacggcaccctttccctaccttttccttctttaatctcctggtttaccattgatgacttcncctcttgcatctactgaatttgatttttcattntgccnctcnntctttcaaaccccctcacnttttccatcctaatcctggcntggcattgaaagggtcatgcntttttggggngaacctcttgggtttaagggccccctccnntcctcaantnacctggatttttncccccncttcctnaaaaccccnctnnagggncntacccctatttagggnntgngnaagaanaaaanggttcnaaantncntccccccccccggcccnaaaataaaaaatttccnacnccctttcccccttttttttttatttgcncntttantggggtttnggaaangg

SEQ ID NO: 219 - DNA, 1186 bp, Homo Sapiens
  misc_feature (1)..(4): n is a, c, g, or t
  misc_feature (842)..(842): n is a, c, g, or t
  misc_feature (849)..(849): n is a, c, g, or t
  misc_feature (888)..(888): n is a, c, g, or t
  misc_feature (891)..(891): n is a, c, g, or t
  misc_feature (895)..(895): n is a, c, g, or t
  misc_feature (903)..(903): n is a, c, g, or t
  misc_feature (929)..(929): n is a, c, g, or t
  misc_feature (932)..(932): n is a, c, g, or t
  misc_feature (947)..(947): n is a, c, g, or t
  misc_feature (962)..(962): n is a, c, g, or t
  misc_feature (968)..(968): n is a, c, g, or t
  misc_feature (971)..(971): n is a, c, g, or t
  misc_feature (978)..(978): n is a, c, g, or t
  misc_feature (982)..(982): n is a, c, g, or t
  misc_feature (1004)..(1004): n is a, c, g, or t
  misc_feature (1016)..(1016): n is a, c, g, or t
  misc_feature (1021)..(1021): n is a, c, g, or t
  misc_feature (1026)..(1026): n is a, c, g, or t
  misc_feature (1049)..(1049): n is a, c, g, or t
  misc_feature (1064)..(1065): n is a, c, g, or t
  misc_feature (1069)..(1069): n is a, c, g, or t
  misc_feature (1072)..(1073): n is a, c, g, or t
  misc_feature (1075)..(1075): n is a, c, g, or t
  misc_feature (1077)..(1077): n is a, c, g, or t
  misc_feature (1110)..(1110): n is a, c, g, or t
  misc_feature (1114)..(1114): n is a, c, g, or t
  misc_feature (1125)..(1125): n is a, c, g, or t
  misc_feature (1131)..(1131): n is a, c, g, or t
  misc_feature (1142)..(1142): n is a, c, g, or t
  misc_feature (1155)..(1155): n is a, c, g, or t
  misc_feature (1164)..(1164): n is a, c, g, or t
  misc_feature (1179)..(1179): n is a, c, g, or t
  misc_feature (1181)..(1186): n is a, c, g, or t
nnnntagagaaattactatgagaggatcgcatcaccatcaccatcacggatcctatttaggtgacactatagaatcgtcgacccacgcgtccgggggaaggaggatggcggatatcatcgcaagactccgggaggacgggatccaaaaacgtgtgatacaggaaggccgaggagagctcccggactttcaagatgggaccaaggccacgttccactaccggacgctgcacagtgacgacgagggcaccgtgctggacgacagccgggctcgtggcaagcccatggagctcatcattggcaagaagttcaagctgcctgtgtgggagaccatcgtgtgcaccatgcgagaaggggagattgcccagttcctctgtgacatcaagcatgtggtcctgtacccgctggtggccaagagtctccgcaacatcgcggtgggcaaggaccccctggagggccagcggcactgctgcggtgttgcacagatgcgtgaacacagctccctgggccatgctgacctggacgccctgcagcagaacccccagcccctcatcttccacatggagatgctgaaggtggagagccctggcacgtaccagcaggacccatgggccatgacagacgaagagaaggcaaaggcagtgccacttatccaccaggagggcaaccggttgtaccgcgaggggcatgtgaaggaggctgctgccaagtactacgatgccattgcctgcctcaagaacctgcagatgaaggaacagcctgggtcccctgaatggatccagctggacaagcagatcacgccgctgctgctcaactactgccagtgcaagctggtggtcgaggantactacnaagtgctggaccactgctcttccatcctcaacaagtacnacnacancgtcaagnctacttcaagcggggcaaggcccacncgnccgtgtggaatgccnagaagcccagctgantttgcnaantgctganctgnaccaccctggccctgtggtgancaaaactgcggncctgnaggcncgatccgcaaaagacaaaaaaanaaacccgttccgggnntttnccnntnanagaaaattgcctgcttactgcaaaccatttganttcnaccccctgccnggttgnttttgtttttnttttaagcctttntttttttcnaaaaaaaaaaaaaanannnnnn

SEQ ID NO: 220 - DNA, 1140 bp, Homo Sapiens
  misc_feature (12)..(12): n is a, c, g, or t
  misc_feature (932)..(932): n is a, c, g, or t
  misc_feature (945)..(945): n is a, c, g, or t
  misc_feature (952)..(952): n is a, c, g, or t
  misc_feature (959)..(959): n is a, c, g, or t
  misc_feature (965)..(965): n is a, c, g, or t
  misc_feature (1000)..(1000): n is a, c, g, or t
  misc_feature (1008)..(1008): n is a, c, g, or t
  misc_feature (1041)..(1041): n is a, c, g, or t
  misc_feature (1049)..(1049): n is a, c, g, or t
  misc_feature (1056)..(1056): n is a, c, g, or t
  misc_feature (1061)..(1061): n is a, c, g, or t
  misc_feature (1075)..(1075): n is a, c, g, or t
  misc_feature (1082)..(1082): n is a, c, g, or t
  misc_feature (1086)..(1089): n is a, c, g, or t
  misc_feature (1104)..(1104): n is a, c, g, or t
  misc_feature (1108)..(1108): n is a, c, g, or t
  misc_feature (1117)..(1117): n is a, c, g, or t
  misc_feature (1122)..(1122): n is a, c, g, or t
  misc_feature (1126)..(1126): n is a, c, g, or t
  misc_feature (1130)..(1130): n is a, c, g, or t
  misc_feature (1135)..(1135): n is a, c, g, or t
  misc_feature (1138)..(1139): n is a, c, g, or t
tagagaaattanctatgagaggatcgcatcaccatcaccatcacggatcctatttaggtgacactatagaatcgtcgacccacgcgtccgcctgcagcgactcttccttctgcagccactcagaccctggcgccttctatctggatctgcagccctccccatttgagtctaagatgtcttatgagtcccatcaccctgaaagtggaggaagggaagggggctatggttgccctcatgcctcttctcctgagcttgatgccaactgcaactcctaccgcccacactgtgagccgtgcccagcagtggctgacctcacagcctgcttccaaagccaggcccgtcttgttgtggccacacaaaattactataaacttgtcacctgtgacctatcttcccaatcatccccaagccctgctggctcttccatcactagctgctctgaggaacacaccaagataagtcccccaccaggccctggcccagacccaggccccagccagccctctgagtattacctattccagaagccagaagtccagccagaggaacaagaagcagtgagttcctccacccaagcagcagctgctgtgggccccactgtgcttgagggacaagtatacacgaatacttcaccccccaacctcagcactggacgtcagcgctcccgcagctatgatcgcagcctgcagcgcagccctcctgtccgcctgggctcgctggaacgtatgttgagttgcccagtgcgcttgagtgagggccctgcagccatggccgggcctggctccccacccaggagggtcacctcctttgccgagctggccaagggccggaagaaaactggaggctctggctcgcccccacttcgtgtgagtgttggggactcctcccaggagttctcacccatccaagaagcccagcaagatcgggggggncccactggatganggcactngctgtanccatancctgccacccatgcctttggggccaggcatggacntacttggnccaaacccaagtccaccctggtccacccaggtntgtcaggnaccccantccantgaaatgcctctgntggcttnaaannnngggaaggcccctggntaantgaggatcngggcnggtntccnggganccnnc

SEQ ID NO: 221 - DNA, 1079 bp, Homo Sapiens
  misc_feature (1)..(3): n is a, c, g, or t
  misc_feature (899)..(899): n is a, c, g, or t
  misc_feature (964)..(964): n is a, c, g, or t
  misc_feature (969)..(969): n is a, c, g, or t
  misc_feature (987)..(987): n is a, c, g, or t
  misc_feature (989)..(990): n is a, c, g, or t
  misc_feature (997)..(997): n is a, c, g, or t
  misc_feature (999)..(999): n is a, c, g, or t
  misc_feature (1004)..(1004): n is a, c, g, or t
  misc_feature (1008)..(1008): n is a, c, g, or t
  misc_feature (1013)..(1013): n is a, c, g, or t
  misc_feature (1015)..(1015): n is a, c, g, or t
  misc_feature (1031)..(1031): n is a, c, g, or t
  misc_feature (1035)..(1035): n is a, c, g, or t
  misc_feature (1039)..(1039): n is a, c, g, or t
  misc_feature (1045)..(1045): n is a, c, g, or t
  misc_feature (1049)..(1049): n is a, c, g, or t
  misc_feature (1052)..(1052): n is a, c, g, or t
  misc_feature (1065)..(1065): n is a, c, g, or t
  misc_feature (1068)..(1069): n is a, c, g, or t
  misc_feature (1076)..(1076): n is a, c, g, or t
nnnttagagagattactatgagaggatcgcatcaccatcaccatcacggatcctatttaggtgacactatagaatcgtcgacccacgcgtccgacttgctccaggaagccaggagcccagacccagggatagtgccgcaggaggcgcctgttggaaactcactttccgagctaagcgaagaaaattttgatggaaaatttgctaatctgaccccctcgaggacggtgccagactcggaggcccccccagggtgggatcgtgccgactcgggtcccacgcagccacctctgtctctctcacccgctcccgaaacaaagagacccggacaggcagccaagaaagaaacgaaggaacctaagaagggtgaatcctggttctttcgttggctacctggaaagaaaaagacagaagcttatttgccagatgacaagaacaaatcgattgtttgggatgaaaagaaaaaccagtgggtgaatttaaatgagccagaagaggagaagaaagccccgcccccacctccaacctcgatgcccaagactgtgcaagctgccccgcctgccctcccagggcctcctggagcccccgtgaacatgtactctagaagagcagcaggaaccagagctcgctacgttgacgtcctgaacccaagcgggacccagcggagcgagccggctctcgctcctgcggactttgtcgctccactcgcgccactcccaattccttctaacttgttcgtgccaaccccagatgcagaagaaccacagcttccagacgggactggcagggaagggcctgcagcagctaggggcctggccaatccagagcctgccccagagcccaaggttttaagctctgcagcgtcactccctggctctgaactcccctcctccaggcctganggttcccagggaggaaaggctcctggcgacctcctgctgcagggggccctcccagcgggccatgnccttntacaacctgctcactggnanngcctgcncncctcngganctcangntagggaggattggccnaagnaacncctggngctnaantaggcttgcccgntgnnacttgcnttg

SEQ ID NO: 222 - DNA, 983 bp, Homo Sapiens
  misc_feature (743)..(743): n is a, c, g, or t
  misc_feature (800)..(800): n is a, c, g, or t
  misc_feature (807)..(807): n is a, c, g, or t
  misc_feature (860)..(860): n is a, c, g, or t
  misc_feature (888)..(888): n is a, c, g, or t
  misc_feature (893)..(893): n is a, c, g, or t
  misc_feature (927)..(927): n is a, c, g, or t
  misc_feature (941)..(941): n is a, c, g, or t
  misc_feature (954)..(954): n is a, c, g, or t
  misc_feature (960)..(960): n is a, c, g, or t
  misc_feature (966)..(966): n is a, c, g, or t
  misc_feature (971)..(971): n is a, c, g, or t
  misc_feature (973)..(973): n is a, c, g, or t
  misc_feature (981)..(981): n is a, c, g, or t
tagagaaattactatgagaggatcgcatcaccatcaccatcacggatcctatttaggtgacactatagaatcgtcgacccacgcgtccgccgcacgcgacggcctcggcgacggcggcgggcggcaacggcagcgtggaggaccgcttctccgacgaccagctcgtgtccatgtccgtgcgcgagctgaaccgccacctgcggggcttcaccaaggacgaggtgatccgcctgaagcagaagcggcggaccctgaagaaccggggctacgcccagtcttgcaggtataaacgcgtccagcagaagcaccacctggagaatgagaagacgcagctcattcagcaggtggagcagcttaagcaggaggtgtcccggctggcccgcgagagagacgcctacaaggtcaagtgcgagaaactcgccaactccggcttcagggaggcgggctccaccagcgacagcccctcctctcccgagttctttctgtgagtcgtggccggtcctggcccccgcccttgccccggcccggactccctgtcccacgtccctagtcccagactaccccggaccctgtccctgccgcggccccagccttgacctgtttgacttgagcgagagggaggaagggcgcgcgggccgcgggcgacgggcgggtgcgcgggcgggcaggggaccttggctaaggcgagagtagcgcacgccagcgccgcctcctagactcgagcagagccggagagagagacnagagggtgggaggtcccggagtaacttctctccaggctgaagggcggcgaggcatantcccganaagtcaccaaggccatctggagactcctggctttctgaactttgcgcgttaanccgggacagctgcttttgctgcccgganagtantccgcgcccaggaaaaaagcaacgaggaaagganaagggactctggcnttcccggcaggcnaaaagncaaggnttaancnaaaaaaanga

SEQ ID NO: 223 - DNA, 1378 bp, Homo Sapiens
  misc_feature (944)..(944): n is a, c, g, or t
  misc_feature (952)..(952): n is a, c, g, or t
  misc_feature (981)..(981): n is a, c, g, or t
  misc_feature (995)..(995): n is a, c, g, or t
  misc_feature (997)..(997): n is a, c, g, or t
  misc_feature (1031)..(1031): n is a, c, g, or t
  misc_feature (1033)..(1033): n is a, c, g, or t
  misc_feature (1044)..(1045): n is a, c, g, or t
  misc_feature (1056)..(1056): n is a, c, g, or t
  misc_feature (1070)..(1070): n is a, c, g, or t
  misc_feature (1084)..(1084): n is a, c, g, or t
  misc_feature (1089)..(1089): n is a, c, g, or t
  misc_feature (1093)..(1093): n is a, c, g, or t
  misc_feature (1099)..(1099): n is a, c, g, or t
  misc_feature (1104)..(1104): n is a, c, g, or t
  misc_feature (1110)..(1110): n is a, c, g, or t
  misc_feature (1119)..(1119): n is a, c, g, or t
  misc_feature (1126)..(1126): n is a, c, g, or t
  misc_feature (1129)..(1130): n is a, c, g, or t
  misc_feature (1137)..(1137): n is a, c, g, or t
  misc_feature (1148)..(1148): n is a, c, g, or t
  misc_feature (1158)..(1158): n is a, c, g, or t
  misc_feature (1167)..(1167): n is a, c, g, or t
  misc_feature (1181)..(1182): n is a, c, g, or t
  misc_feature (1184)..(1184): n is a, c, g, or t
  misc_feature (1190)..(1190): n is a, c, g, or t
  misc_feature (1195)..(1195): n is a, c, g, or t
  misc_feature (1216)..(1216): n is a, c, g, or t
  misc_feature (1221)..(1221): n is a, c, g, or t
  misc_feature (1230)..(1230): n is a, c, g, or t
  misc_feature (1237)..(1237): n is a, c, g, or t
  misc_feature (1250)..(1250): n is a, c, g, or t
  misc_feature (1262)..(1262): n is a, c, g, or t
  misc_feature (1275)..(1275): n is a, c, g, or t
  misc_feature (1278)..(1278): n is a, c, g, or t
  misc_feature (1287)..(1287): n is a, c, g, or t
  misc_feature (1289)..(1290): n is a, c, g, or t
  misc_feature (1304)..(1304): n is a, c, g, or t
  misc_feature (1329)..(1329): n is a, c, g, or t
  misc_feature (1342)..(1342): n is a, c, g, or t
  misc_feature (1344)..(1344): n is a, c, g, or t
  misc_feature (1347)..(1347): n is a, c, g, or t
  misc_feature (1354)..(1354): n is a, c, g, or t
  misc_feature (1359)..(1360): n is a, c, g, or t
  misc_feature (1368)..(1368): n is a, c, g, or t
  misc_feature (1377)..(1377): n is a, c, g, or t
gtaatagagagattactatgagaggatcgcatcaccatcaccatcacggatcctatttaggtgacactatagaatcgtcgacccacgcgtccgcagatgaagacggcccagaaacacactttgatgaattagaggatgtgtttctgctggaaactgataacccgaggacaacactagtgtatggcatttttacaacatcaagctcagttttcaaaggatcagccgtgtgtgtgtatcatttatctgatatacagactgtgtttaatgggccttttgcccacaaagaagggcccaatcatcagctgatttcctatcagggcagaattccatatcctcgccctggaacttgtccaggaggagcatttacacccaatatgcgaaccaccaaggagttcccagatgatgttgtcacttttattcggaaccatcctctcatgtacaattccatctacccaatccacaaaaggcctttgattgttcgtattggcactgactacaagtatacaaagatagctgtggatcgagtgaacgctgctgatgggagataccatgtcctgtttctcggaacagatcggggtactgtgcaaaaagtggttgttcttcctactaacaactctgtcagtggcgagctcattctggaggagctggaagtctttaagaatcatgctcctataacaacaatgaaaatttcatctaaaaagcaacagttgtatgtgagttccaatgaaggggtttcccaagtatctctgcaccgctgccacatctatggtacagcctgtgctgactgctgcctggcgcgggacccttattgcgcctgggatggccattcctgttccagattctacccaactgggaaacggaggagccgaagacaagatgtgagacatggaaaccccactgactcaatgcagagggatttaatctaaaagcatacagaaatgcanctgaaatngtgcagtatggagtaaaaaaataacaccnctttttctgggagngngcccccccaagtcccccgcaggcatcttatcaangnggctgtttacnnaaaagacaaanacgggaggaaaaangttaaacctgaaangaacnaaanaaaaanccccnttccangggaccccntgatccnccnntgttcangggtctgaacnaaggactttntccctgccnttgctaaaaaaaannanttttcnagcanaaccaaacccaaaatcaactncaagnttttaaatnccaaaanggggggcggttgnacgaaaaagggncccgggaaccggnccnccctgggangnntttccctccccccnaagaacttgggggccttcccccccnaaaggggaaattncnaangggaaancccgnnccactccngggggaaanc

SEQ ID NO: 224 - DNA, 1156 bp, Homo Sapiens
  misc_feature (805)..(805): n is a, c, g, or t
  misc_feature (876)..(876): n is a, c, g, or t
  misc_feature (903)..(903): n is a, c, g, or t
  misc_feature (918)..(918): n is a, c, g, or t
  misc_feature (948)..(948): n is a, c, g, or t
  misc_feature (972)..(972): n is a, c, g, or t
  misc_feature (975)..(975): n is a, c, g, or t
  misc_feature (977)..(977): n is a, c, g, or t
  misc_feature (991)..(991): n is a, c, g, or t
  misc_feature (995)..(995): n is a, c, g, or t
  misc_feature (997)..(997): n is a, c, g, or t
  misc_feature (1004)..(1004): n is a, c, g, or t
  misc_feature (1008)..(1008): n is a, c, g, or t
  misc_feature (1013)..(1013): n is a, c, g, or t
  misc_feature (1031)..(1031): n is a, c, g, or t
  misc_feature (1034)..(1034): n is a, c, g, or t
  misc_feature (1041)..(1041): n is a, c, g, or t
  misc_feature (1043)..(1043): n is a, c, g, or t
  misc_feature (1046)..(1046): n is a, c, g, or t
  misc_feature (1053)..(1053): n is a, c, g, or t
  misc_feature (1059)..(1059): n is a, c, g, or t
  misc_feature (1070)..(1070): n is a, c, g, or t
  misc_feature (1074)..(1074): n is a, c, g, or t
  misc_feature (1077)..(1077): n is a, c, g, or t
  misc_feature (1086)..(1086): n is a, c, g, or t
  misc_feature (1096)..(1096): n is a, c, g, or t
  misc_feature (1098)..(1098): n is a, c, g, or t
  misc_feature (1109)..(1109): n is a, c, g, or t
  misc_feature (1116)..(1116): n is a, c, g, or t
  misc_feature (1119)..(1121): n is a, c, g, or t
  misc_feature (1125)..(1125): n is a, c, g, or t
  misc_feature (1135)..(1135): n is a, c, g, or t
  misc_feature (1144)..(1144): n is a, c, g, or t
  misc_feature (1147)..(1147): n is a, c, g, or t
  misc_feature (1151)..(1151): n is a, c, g, or t
  misc_feature (1154)..(1154): n is a, c, g, or t
aatagagaaattactatgagaggatcgcatcaccatcaccatcacggatcctatttaggtgacactatagaatcgtcgacccacgcgtccgcccacgcgtccgcccacgcgtccgagacgatggagttttactgtgaggcctgtgagacggccatgtgtggtgagtgccgcgccggggagcatcgtgagcatggcacagtgctgctgagggatgtggtggagcagcacaaggcggccctgcagcgccagctcgaggctgtgcgtggccgattgccacagctgtccgcagcaattgccttagtcgggggcatcagccagcagctgcaggagcgcaaggcagaggccctggcccagatcagtgcagcgttcgaggacctggagcaagcactgcagcagcgcaagcaggctctggtcagcgacctggagaccatttgtggggccaaacagaaggtgttgcaaagccagctggacacactgcgccagggtcaggaacacatcggcagtagctgcagctttgcagagcaggcactgcgcctgggctcggccccggaggtgttgctggtgcgcaagcacatgcgagagcggctggctgcattggcggcacaggccttcccggagcggccacatgagaatgcacagctggaactggtccttgaggtggacggtctgcggcgatcggtgctcaatctgggcgcactgctcaccacgagcgccactgcacacgaaacggtggccacgggagagggcctgcgccaggcgctagtgggccagcctgcctcgctcactgtcactaccaaagacaagnacgggcggttggtgcgcacaggcagcgctgaactgcgtgcaaagatcaccggcccggaacggcacgcgccnttccggtgccagtggtggaaccacaanaatggcacatatganctagtgtacacagcccgcacggaaggcganctgctcctctcggtgctgctctangananccagtgcgcggcancccntncccgtgngtgncctgngtccggggaactgccacnttncccgaananttnaaccccntgtcantcccttggggncccnggnaaccatgtncccaaaaagnantgctaagcccnactcctntannncaangggggaaaanaaaggaaanccnattnaanaa

SEQ ID NO: 225 - DNA, 1192 bp, Homo Sapiens
  misc_feature (796)..(796): n is a, c, g, or t
  misc_feature (901)..(901): n is a, c, g, or t
  misc_feature (903)..(903): n is a, c, g, or t
  misc_feature (912)..(912): n is a, c, g, or t
  misc_feature (915)..(915): n is a, c, g, or t
  misc_feature (918)..(918): n is a, c, g, or t
  misc_feature (938)..(938): n is a, c, g, or t
  misc_feature (946)..(946): n is a, c, g, or t
  misc_feature (950)..(950): n is a, c, g, or t
  misc_feature (955)..(955): n is a, c, g, or t
  misc_feature (965)..(965): n is a, c, g, or t
  misc_feature (971)..(971): n is a, c, g, or t
  misc_feature (973)..(973): n is a, c, g, or t
  misc_feature (992)..(992): n is a, c, g, or t
  misc_feature (1020)..(1020): n is a, c, g, or t
  misc_feature (1022)..(1022): n is a, c, g, or t
  misc_feature (1047)..(1047): n is a, c, g, or t
  misc_feature (1049)..(1049): n is a, c, g, or t
  misc_feature (1054)..(1054): n is a, c, g, or t
  misc_feature (1061)..(1061): n is a, c, g, or t
  misc_feature (1069)..(1069): n is a, c, g, or t
  misc_feature (1071)..(1071): n is a, c, g, or t
  misc_feature (1076)..(1077): n is a, c, g, or t
  misc_feature (1088)..(1088): n is a, c, g, or t
  misc_feature (1096)..(1096): n is a, c, g, or t
  misc_feature (1105)..(1105): n is a, c, g, or t
  misc_feature (1109)..(1109): n is a, c, g, or t
  misc_feature (1111)..(1111): n is a, c, g, or t
  misc_feature (1116)..(1116): n is a, c, g, or t
  misc_feature (1119)..(1119): n is a, c, g, or t
  misc_feature (1146)..(1146): n is a, c, g, or t
  misc_feature (1150)..(1150): n is a, c, g, or t
  misc_feature (1169)..(1169): n is a, c, g, or t
  misc_feature (1177)..(1178): n is a, c, g, or t
  misc_feature (1186)..(1187): n is a, c, g, or t
  misc_feature (1189)..(1191): n is a, c, g, or t
atagagaaattactatgagaggatcgcatcaccatcaccatcacggatcctatttaggtgacactatagaatcgtcgacccacgcgtccggacctgtggctgccttacttcaacgtgaccacagatatcaccgcctcagccatgcgagtccacaaagatggctccctgtggcggtacgtgcgcgccagcatgacgctgtcgggctacctgcccccgctgtgcgaccccaaggacgggcacctactcatggatggcggctacatcaacaatctgccagcggacatcgcccgcagcatgggtgccaaaacggtcatcgccattgacgtggggagccaggatgagacggacctcagcacctacggggacagcctgtccggctggtggctgctgtggaagcggctgaatccctgggctgacaaggtaaaggttccagacatggctgaaatccagtcccgcctggcctacgtgtcctgtgtgcggcagctagaggttgtcaagtccagctcctactgcgagtacctgcgcccgcccatcgactgcttcaagaccatggactttgggaagttcgaccagatctatgatgtgggctaccagtacgggaaggcggtgtttggaggctggagccgtggcaacgtcattgagaaaatgctcacagaccggcggtctacagaccttaatgagagccgccgtgcagacgtgcttgccttcccaagctctggcttcactgacttggcagagattgtgtcccggattgagccccccacgagctatgtctctgatggctgtgctgacgganaggagtcagattgtctgacagagtatgaggaggacgccggaacccgactgctcgagggatgaaggggggttcccccgagggcgcaagcccaagcactgccttccnanatggagganganaantcgattctccggcaacgaanctgtctgncccnagganccgcccggtnaaccananatgcctgaagaacctcaanaggggtcacccctccctcccacccctgnantgggctgggggtggcccctgggggnanctcantcccccncctggtgntngcctnnaacccccccgncccaaaantgaaatganctgncntgaanggnaatcaggtttccttaataatttaacancccntccccaaaaaatccctttnggaatggnnaaaaaaannannna

SEQ ID NO: 226 - DNA, 1182 bp, Homo Sapiens
  misc_feature (579)..(579): n is a, c, g, or t
  misc_feature (795)..(795): n is a, c, g, or t
  misc_feature (863)..(863): n is a, c, g, or t
  misc_feature (871)..(871): n is a, c, g, or t
  misc_feature (881)..(881): n is a, c, g, or t
  misc_feature (920)..(920): n is a, c, g, or t
  misc_feature (930)..(930): n is a, c, g, or t
  misc_feature (935)..(935): n is a, c, g, or t
  misc_feature (965)..(965): n is a, c, g, or t
  misc_feature (980)..(981): n is a, c, g, or t
  misc_feature (992)..(992): n is a, c, g, or t
  misc_feature (995)..(995): n is a, c, g, or t
  misc_feature (1000)..(1000): n is a, c, g, or t
  misc_feature (1013)..(1013): n is a, c, g, or t
  misc_feature (1019)..(1019): n is a, c, g, or t
  misc_feature (1023)..(1023): n is a, c, g, or t
  misc_feature (1030)..(1030): n is a, c, g, or t
  misc_feature (1037)..(1037): n is a, c, g, or t
  misc_feature (1047)..(1047): n is a, c, g, or t
  misc_feature (1049)..(1049): n is a, c, g, or t
  misc_feature (1051)..(1051): n is a, c, g, or t
  misc_feature (1055)..(1056): n is a, c, g, or t
  misc_feature (1076)..(1076): n is a, c, g, or t
  misc_feature (1082)..(1082): n is a, c, g, or t
  misc_feature (1093)..(1093): n is a, c, g, or t
  misc_feature (1100)..(1100): n is a, c, g, or t
  misc_feature (1102)..(1102): n is a, c, g, or t
  misc_feature (1108)..(1108): n is a, c, g, or t
  misc_feature (1112)..(1112): n is a, c, g, or t
  misc_feature (1116)..(1116): n is a, c, g, or t
  misc_feature (1121)..(1121): n is a, c, g, or t
  misc_feature (1124)..(1124): n is a, c, g, or t
  misc_feature (1133)..(1133): n is a, c, g, or t
  misc_feature (1135)..(1136): n is a, c, g, or t
  misc_feature (1149)..(1149): n is a, c, g, or t
  misc_feature (1155)..(1155): n is a, c, g, or t
  misc_feature (1160)..(1160): n is a, c, g, or t
  misc_feature (1167)..(1167): n is a, c, g, or t
  misc_feature (1169)..(1169): n is a, c, g, or t
ctatagagaaattactatgagaggatcgcatcaccatcaccatcacggatcctatttaggtgacactatagaatcgtcgacccacgcgtccgagctcagaatggacccaacaccagcctggccagcctcctgtgaggccttgatggggccatccagctccgcagggcctgcgcgtctccggcttccacccagacggcactcaagcctgcccccgaggcgtgcttccttcctgattgtctctagagcttccaagtcctgggaatgtgcggggccagtccctgccctcccaggaggggtggtagccgttcccacctcgcagcaggacccccagtgcagaggctcacaggtggcacacaggcgctgtctctccagagccatccttcagagtggacctcagtgccagtcctgcctcagcatctgggtcacgtcggccaggagtagggtgcaggcctccagcaggtcctaatcctgtgtgccagggcaggcagtgccccaggggcaccacgcctgactctccatcacccaggccttgatgccgagcgggagtagagtgtttcctctgctcaaggcaatttccanagcccggatgccagtttctggcctgaatttggagggaagaagtaatggccctagtgtgggacgaagcacagatcccagcacttttcccagctttctctccagcatcagtccctgcagcagctggggcctctggtcaggaaccctcagggacccaggaactcagcttccaaacatctgcaccttgaccggactcgccatcccgccgtgggggtgcangtgattgtaaacacgggtgtgcatgtggatgcacacggggtgtgcggtgaaaatctgtggagatgganctgggganctgaagctcntgttgcacccaaccaccttcccccattttgtggctgctnaaggggcaanaaacnggggaatgggctcgtctcctaaaatttaanatcaccctcctcaanntaacttaaaantgngtggnacgggcccccccncccccnaaanttggaanccaaggnatttttttcntngnaaanntggggcccttcctggtcaancttttngtccccaattncttcaangntttaantttnttgntgganttntggggaaantnnaaaacccccaccnaaacangcccnaggaacncnccttggcccaaaa

SEQ ID NO: 227 - DNA, 1006 bp, Homo Sapiens
  misc_feature (1)..(3): n is a, c, g, or t
  misc_feature (9)..(9): n is a, c, g, or t
  misc_feature (656)..(656): n is a, c, g, or t
  misc_feature (696)..(696): n is a, c, g, or t
  misc_feature (800)..(800): n is a, c, g, or t
  misc_feature (806)..(806): n is a, c, g, or t
  misc_feature (808)..(808): n is a, c, g, or t
  misc_feature (815)..(815): n is a, c, g, or t
  misc_feature (839)..(839): n is a, c, g, or t
  misc_feature (842)..(842): n is a, c, g, or t
  misc_feature (848)..(848): n is a, c, g, or t
  misc_feature (863)..(863): n is a, c, g, or t
  misc_feature (869)..(869): n is a, c, g, or t
  misc_feature (882)..(882): n is a, c, g, or t
  misc_feature (911)..(911): n is a, c, g, or t
  misc_feature (923)..(923): n is a, c, g, or t
  misc_feature (935)..(935): n is a, c, g, or t
  misc_feature (945)..(945): n is a, c, g, or t
  misc_feature (950)..(952): n is a, c, g, or t
  misc_feature (954)..(954): n is a, c, g, or t
  misc_feature (957)..(957): n is a, c, g, or t
  misc_feature (962)..(962): n is a, c, g, or t
  misc_feature (969)..(970): n is a, c, g, or t
  misc_feature (984)..(984): n is a, c, g, or t
  misc_feature (994)..(994): n is a, c, g, or t
  misc_feature (1002)..(1002): n is a, c, g, or t
  misc_feature (1005)..(1006): n is a, c, g, or t
nnnagaganattactatgagaggatcgcatcaccatcaccatcacggatcctatttaggtgacactatagaatcgtcgacccacgcgtccggcgcgcgctgcccgcggcaggacccggccgcctccgccgccgccgccgcccctaagcctcccgaagccatggccgggctcggccaccccgccgccttcggccgggccacccacgccgtggtgcgggcgctacccgagtcgctcggccagcacgcgctgagaagcgccaagggcgaggaggtggacgtcgcccgcgcggaacggcagcaccagctctacgtgggcgtgctgggcagcaagctggggctgcaggtggtggagctgccggccgacgagagccttccggactgcgtcttcgtggaggacgtggccgtggtgtgcgaggagacggccctcatcacccgacccggggcgccgagccggaggaaggaggttgacatgatgaaagaagcattagaaaaacttcagctcaatatagtagagatgaaagatgaaaatgcaactttagatggcggagatgttttattcacaggcagagaattttttgtgggcctttccaaaaaggacaaatcaacgaggtgctgaaatcttggctgatacttttaaggactatgcagtctccacantgccagtggcagatgggttgcatttgaagagtttctgcancatggctgggcctaacctgatcgcaattgggtctagtgaaatctgcacagaaaggccctttaagatcatgcaacaaaatgagtgaaccaaccgctacgacaaantcactntngcctgangaaataacaaccaaactgtttatntcnaaattntccccaaaaaagggnacgttnttgtttgcaccgnaaccccgggaaaaatattccagaaaagtngcaaaagttttntgaaaaaaattnaaaggaaccnttttnnntnatnccccntggaacnnttttttgaacttgnaaaaaaggtngaatgggnctnn

SEQ ID NO: 228 - DNA, 1229 bp, Homo Sapiens
  misc_feature (1)..(1): n is a, c, g, or t
  misc_feature (976)..(976): n is a, c, g, or t
  misc_feature (986)..(986): n is a, c, g, or t
  misc_feature (994)..(994): n is a, c, g, or t
  misc_feature (998)..(998): n is a, c, g, or t
  misc_feature (1000)..(1000): n is a, c, g, or t
  misc_feature (1005)..(1005): n is a, c, g, or t
  misc_feature (1023)..(1023): n is a, c, g, or t
  misc_feature (1031)..(1031): n is a, c, g, or t
  misc_feature (1036)..(1036): n is a, c, g, or t
  misc_feature (1054)..(1054): n is a, c, g, or t
  misc_feature (1062)..(1062): n is a, c, g, or t
  misc_feature (1071)..(1071): n is a, c, g, or t
  misc_feature (1073)..(1073): n is a, c, g, or t
  misc_feature (1087)..(1087): n is a, c, g, or t
  misc_feature (1093)..(1093): n is a, c, g, or t
  misc_feature (1095)..(1095): n is a, c, g, or t
  misc_feature (1099)..(1099): n is a, c, g, or t
  misc_feature (1106)..(1106): n is a, c, g, or t
  misc_feature (1125)..(1125): n is a, c, g, or t
  misc_feature (1132)..(1132): n is a, c, g, or t
  misc_feature (1139)..(1139): n is a, c, g, or t
  misc_feature (1143)..(1143): n is a, c, g, or t
  misc_feature (1146)..(1147): n is a, c, g, or t
  misc_feature (1177)..(1177): n is a, c, g, or t
  misc_feature (1182)..(1182): n is a, c, g, or t
  misc_feature (1191)..(1191): n is a, c, g, or t
  misc_feature (1195)..(1195): n is a, c, g, or t
  misc_feature (1197)..(1197): n is a, c, g, or t
  misc_feature (1200)..(1200): n is a, c, g, or t
  misc_feature (1204)..(1204): n is a, c, g, or t
  misc_feature (1212)..(1212): n is a, c, g, or t
  misc_feature (1215)..(1217): n is a, c, g, or t
  misc_feature (1226)..(1226): n is a, c, g, or t
  misc_feature (1229)..(1229): n is a, c, g, or t
naatagagaaattactatgagaggatcgcatcaccatcaccatcacggatcctatttaggtgacactatagaatcgtcgacccacgcgtccgcctgcaggtattttatgcatggggtttgtaaggaaggagacaactgtcgctactcgcatgacctctctgacagtccgtatagtgtagtgtgcaagtattttcagcgagggtactgtatttatggagaccgctgcagatatgaacatagcaagccattgaaacaggaagaagcaactgctacagagctaactacaaagtcatcccttgctgcttcctcaagtctctcatcgatagttggaccacttgttgaaatgaatacaggcgaagctgagtcaagaaattcaaactttgcaactgtaggagcaggttcagaggactgggtgaatgctattgagtttgttcctgggcaaccctactgtggccgtactgcgccttcctgcactgaagcacccctgcagggctcagtgaccaaggaagaatcagagaaagagcaaaccgccgtggagacaaagaagcagctgtgcccctatgctgcagtgggagagtgccgatacggggagaactgtgtgtatctccacggagattcttgtgacatgtgtgggctgcaggtcctgcatccaatggatgctgcccagagatcgcagcatatcaaatcgtgcattgaggcccatgagaaggacatggagctctcatttgccgtgcagcgcagcaaggacatggtgtgtgggatctgcatggaggtggtctatgagaaagccaaccccagtgagcgccgcttcgggatcctctccaactgcaaccacacctactgtctcaagtgcattcgcaagtggaggagtgctaagcaatttgagagcaagatcataaagtcctgcccagaatgccggatcacatctaactttgtcattccaagtgagtactgggtggaaggaaaaagaaaaaanccaaaactcnttctgaantacnanggagncaatgaaccaacaaggcntgcaggtnttttnaatgaaggacgtgggaanctgcccanttggaaggnanctgttttttacaancatgcntncccntgatggnccgtaaaaaaggacccccnaaaaacnaaaaggngggnaanntccaagccaaaaaccggggcccaacaaagnaaccnctttcgggnaacncnttngggnaaaaaaanaannnccccccccnttn

SEQ ID NO: 229 - DNA, 1182 bp, Homo Sapiens
  misc_feature (6)..(6): n is a, c, g, or t
  misc_feature (797)..(797): n is a, c, g, or t
  misc_feature (928)..(928): n is a, c, g, or t
  misc_feature (938)..(938): n is a, c, g, or t
  misc_feature (949)..(949): n is a, c, g, or t
  misc_feature (952)..(952): n is a, c, g, or t
  misc_feature (1001)..(1001): n is a, c, g, or t
  misc_feature (1006)..(1006): n is a, c, g, or t
  misc_feature (1014)..(1014): n is a, c, g, or t
  misc_feature (1018)..(1018): n is a, c, g, or t
  misc_feature (1027)..(1027): n is a, c, g, or t
  misc_feature (1033)..(1034): n is a, c, g, or t
  misc_feature (1037)..(1037): n is a, c, g, or t
  misc_feature (1041)..(1041): n is a, c, g, or t
  misc_feature (1060)..(1060): n is a, c, g, or t
  misc_feature (1070)..(1070): n is a, c, g, or t
  misc_feature (1089)..(1089): n is a, c, g, or t
  misc_feature (1093)..(1094): n is a, c, g, or t
  misc_feature (1099)..(1099): n is a, c, g, or t
  misc_feature (1103)..(1103): n is a, c, g, or t
  misc_feature (1111)..(1111): n is a, c, g, or t
  misc_feature (1113)..(1113): n is a, c, g, or t
  misc_feature (1121)..(1121): n is a, c, g, or t
  misc_feature (1123)..(1123): n is a, c, g, or t
  misc_feature (1127)..(1127): n is a, c, g, or t
  misc_feature (1138)..(1138): n is a, c, g, or t
  misc_feature (1147)..(1147): n is a, c, g, or t
  misc_feature (1159)..(1160): n is a, c, g, or t
  misc_feature (1172)..(1172): n is a, c, g, or t
  misc_feature (1178)..(1179): n is a, c, g, or t
  misc_feature (1182)..(1182): n is a, c, g, or t
tagagnaattactatgagaggatcgcatcaccatcaccatcacggatcctatttaggtgacactatagaatcgtcgacccacgcgtccgcttcaccagcctccaccaagacgggacaagcagggagtttatccggcagcccaaagcccttctctcctcaactgtcagctcctatcacgacgaaaacggacaaaacctccaccaccggcagcatcctgaatcttaacctggatcgaagcaaagctgagatggatttgaaggagctgagcgagtcggtccagcaacagtccacccctgttcctctcatctctcccaagcgccagattcgtagcaggttccagctgaatcttgacaagaccatagagagttgcaaagcacaattaggcataaatgaaatctcggaagatgtctatacggccgtagagcacagcgattcggaggattctgagaagtcagatagtagcgatagtgagtatatcagtgatgatgagcagaagtctaagaacgagccagaagacacagaggacaaagaaggttgtcagatggacaaagagccatctgctgttaaaaaaaagcccaagcctacaaacccagtggagattaaagaggagctgaaaagcacgtcaccagccagcgagaaggcagaccctggagcagtcaaggacaaggccagccctgagcctgagaaggacttttccgaaaaggcaaaaccttcacctcaccccataaaggataaactgaagggaaaagatgagacggattccccaacagtccatttgggcctggactctgattcanagagcgaacttgtcatagatttaggagaagaccattctggggcggggagggtcgaaaaaataagaaggaacccaaagaaccatctcccaaacaggatggttgtaggtaaaactccaccatccacgacgggnggggcagccnttctccccggnaancacgggtgctcacccgctcttccgcccaaacttccgggggtggggccanagccncccaccangcangtcctccangggtcnncgntcangggcccgggcccccgccgncccagggaanccccagggaaaaaccaaanggcnnttttncccnaaggaaangncccggccngncacngggtcgggggnaacttttcnagtaatttttanngccccccaaaanggggcnntgn

SEQ ID NO: 230 - DNA, 1197 bp, Homo Sapiens
  misc_feature (756)..(756): n is a, c, g, or t
  misc_feature (811)..(811): n is a, c, g, or t
  misc_feature (887)..(887): n is a, c, g, or t
  misc_feature (894)..(894): n is a, c, g, or t
  misc_feature (900)..(900): n is a, c, g, or t
  misc_feature (911)..(911): n is a, c, g, or t
  misc_feature (919)..(919): n is a, c, g, or t
  misc_feature (924)..(924): n is a, c, g, or t
  misc_feature (931)..(931): n is a, c, g, or t
  misc_feature (937)..(937): n is a, c, g, or t
  misc_feature (944)..(944): n is a, c, g, or t
  misc_feature (976)..(976): n is a, c, g, or t
  misc_feature (1007)..(1007): n is a, c, g, or t
  misc_feature (1009)..(1009): n is a, c, g, or t
  misc_feature (1011)..(1011): n is a, c, g, or t
  misc_feature (1021)..(1021): n is a, c, g, or t
  misc_feature (1023)..(1023): n is a, c, g, or t
  misc_feature (1033)..(1033): n is a, c, g, or t
  misc_feature (1053)..(1053): n is a, c, g, or t
  misc_feature (1058)..(1059): n is a, c, g, or t
  misc_feature (1064)..(1064): n is a, c, g, or t
  misc_feature (1067)..(1067): n is a, c, g, or t
  misc_feature (1085)..(1085): n is a, c, g, or t
  misc_feature (1101)..(1101): n is a, c, g, or t
  misc_feature (1103)..(1103): n is a, c, g, or t
  misc_feature (1113)..(1113): n is a, c, g, or t
  misc_feature (1115)..(1115): n is a, c, g, or t
  misc_feature (1117)..(1117): n is a, c, g, or t
  misc_feature (1157)..(1158): n is a, c, g, or t
  misc_feature (1172)..(1172): n is a, c, g, or t
  misc_feature (1182)..(1182): n is a, c, g, or t
  misc_feature (1185)..(1185): n is a, c, g, or t
  misc_feature (1187)..(1189): n is a, c, g, or t
agaatagagagaattactatgagaggatcgcatcaccatcaccatcacggatcctatttaggtgacactatagaatcgtcgacccacgcgtccgcacagccaagcgtccagccacaggagcatcctccagcgcaggtgtcagtacagccaccagagcagacccatgagcagcctcacacccagccgcaggtgtcgttgctggctccagagcaaacaccagttgtggttcatgtctgcgggctggagatgccacctgatgcagtagaagctggtggaggcatggaaaagaccttgccagagcctgtgggcacccaagtcagcatggaagagattcagaatgagtcggcctgtggcctagatgtgggagaatgtgaaaacagagcgagagagatgccaggggtatggggcgccgggggctccctgaaggtcaccattctgcagagcagtgacagccgggcctttagcactgtacccctgacacctgtcccccgccccagtgactccgtctcctccacccctgcggctaccagcactccctctaagcaggccctccagttcttctgctacatctgcaaggccagctgctccagccagcaggagttccaggaccacatgtcggagcctcagcaccagcagcggctaggggagatccagcacatgagccaagcctgcctcctgtccctgctgcccatgccccgggacgtcctggagacagaggatgaggagcctccaccaaggcgctggtgcaacacctgncagctctactacatgggggacctgatccaacaccgcaggacacaggaccacaaanattgccaaacaatcccttgcgacccttctgcaccgttttgcaaccgctacttcaaaacccctcgcaagttttgtgnagcaacnttgaantcccaggggcnataaagancaagnccaaggnaccttnaaattcncttgaaaaaaaaaaatttgctggcccaaaaangaagaaccactttcattacaggtggaacccntntnggttggcttncnagggttgatnaaaaaaaaaagaaaaaagantgatnnagganttnaaaaaaaaaattcgaggnttgaaggaaaaaattntntccaagccangntnaagtcccaaaaaaatttttccaaaaaagaattgaaagggnnccaaaaacttaaancccccaatantgnannngggggggg

SEQ ID NO: 231 - DNA, 1170 bp, Homo Sapiens
  misc_feature (737)..(737): n is a, c, g, or t
  misc_feature (854)..(854): n is a, c, g, or t
  misc_feature (884)..(884): n is a, c, g, or t
  misc_feature (886)..(886): n is a, c, g, or t
  misc_feature (898)..(898): n is a, c, g, or t
  misc_feature (926)..(926): n is a, c, g, or t
  misc_feature (929)..(930): n is a, c, g, or t
  misc_feature (952)..(952): n is a, c, g, or t
  misc_feature (958)..(958): n is a, c, g, or t
  misc_feature (965)..(965): n is a, c, g, or t
  misc_feature (969)..(969): n is a, c, g, or t
  misc_feature (988)..(988): n is a, c, g, or t
  misc_feature (992)..(992): n is a, c, g, or t
  misc_feature (1002)..(1002): n is a, c, g, or t
  misc_feature (1022)..(1023): n is a, c, g, or t
  misc_feature (1040)..(1040): n is a, c, g, or t
  misc_feature (1054)..(1055): n is a, c, g, or t
  misc_feature (1063)..(1063): n is a, c, g, or t
  misc_feature (1076)..(1076): n is a, c, g, or t
  misc_feature (1079)..(1079): n is a, c, g, or t
  misc_feature (1084)..(1085): n is a, c, g, or t
  misc_feature (1095)..(1097): n is a, c, g, or t
  misc_feature (1099)..(1099): n is a, c, g, or t
  misc_feature (1111)..(1111): n is a, c, g, or t
  misc_feature (1120)..(1120): n is a, c, g, or t
  misc_feature (1122)..(1122): n is a, c, g, or t
  misc_feature (1124)..(1124): n is a, c, g, or t
  misc_feature (1154)..(1155): n is a, c, g, or t
  misc_feature (1158)..(1158): n is a, c, g, or t
  misc_feature (1163)..(1163): n is a, c, g, or t
  misc_feature (1165)..(1165): n is a, c, g, or t
gaattagagaaattactatgagaggatcgcatcaccatcaccatcacggatcctatttaggtgacactatagaatcgtcgacccacgcgtccggccatacacctgcctgtggccctttctcagccctgactccgagcatatggccccaggagatcttggccaagtacacgcagaaggaagagtcagcagagcaaccagagttctactacgatgagttttgtttccgtgtgtacaaggaagaaggtgatgagcctggctccagtctgctggcgaactcccctctgatggaggatgctccacagaggctgcggtggcaggcccacctggagttcacccataaccacgatgtgggggatctcacctgggacaagattgccgtctccctaccccgctctgagaagctccgctccctggtgctggccggcatcccacatggcatgaggccacagctgtggatgcggctctctggggccctgcagaagaagaggaactctgagctgtcctaccgcgagattgtgaagaacagctccaacgatgagaccatcgctgccaagcagatcgagaaggacctgctccgcaccatgcccagcaacgcctgcttcgccagcatgggtagcatcggggtgccccgcctgcgcagggtgctccgggccctggcctggctctacccagagatcggctactgccagggcaccggcatggtggccgcctgcctcctgctgttcctggaggaggangacgccttctggatgatgtctgccatcatcgaggacctgctccccgcctcctacttcagcaccaccctgctgggtgtccagactgaccagcgggtcctgcgccacctcattgtccantacctgcctcgcctggaaaactgctccagnancatgacattganctgtccctgatcacactgcactggttcntcnnggccttccccagcgtggggganatcaanctgctcntgcncatttgggaactgtttttntacnagggctcccngggtgctttttccacctccnnctgggatgcttgccccncaaggaggaaaaanntaatcccnttcaaaaaaattnggncttcnntttttaaaannntnttgaaattcccntcccaaaangnanaaacccgaagggcttttggggggggccatnnggntggcngnttccc

SEQ ID NO: 232 - DNA, 866 bp, Homo Sapiens
catcaccatcaccatcacggatcctatttaggtgacactatagaatcgtcgacccacgcgtccgggtccttgtgcacaaaatccgtgtcttacatcaaatacccgaaagcttgtctgcagggaatcaccttcaccagggacggccgctacatggcgctggcagaacggcgcgactgcaaagattacgtgagcatcttcgtctgcagtgattggcagctcctgcggcattttgatacggacacccaggatctcacagggattgagtgggccccaaacggctgtgtgctggcagtgtgggacacctgcttggagtacaagattctgctgtactcattggatggccggttgttgtccacgtacagcgcttacgagtggtccctgggcatcaagtctgtggcctggagccccagcagtcagttcctggcagttgggagctatgatggaaaggtgcgcatccttaatcacgtgacttggaaaatgatcacggagtttgggcatcctgcagccattaatgatcccaagatagtggtgtataaggaggccgagaagagcccacagctgggactgggctgcctctccttcccgccgccccgggccggggccggccctctcccgagctcagagagtaaatatgagatcgcctctgtcccagtctccttacagacactgaaacctgttaccgacagagcaaacccgaaaatcggcataggaatgctggcatttagtcctgacagctacttcctggcgacaaggaacgacaacattcccaatgccgtctgggtctgggacattcagaagctgagctgttcgcggtgctcgagcagctgtccccagtgcgcgcgtttcagtgggacccgcagcagccg

SEQ ID NO: 233 - DNA, 937 bp, Homo Sapiens
  misc_feature (4)..(4): n is a, c, g, or t
  misc_feature (854)..(854): n is a, c, g, or t
  misc_feature (857)..(857): n is a, c, g, or t
  misc_feature (888)..(888): n is a, c, g, or t
  misc_feature (904)..(904): n is a, c, g, or t
  misc_feature (910)..(910): n is a, c, g, or t
  misc_feature (915)..(915): n is a, c, g, or t
  misc_feature (917)..(937): n is a, c, g, or t
caantagagaaattactatgagaggatcgcatcaccatcaccatcacggatcctatttaggtgacactatagaatcgtcgacccacgcgtccgggataattgaggcagaagagtccagaatgggcctcatcatcgtcaatgcctggtacgggaagtttgtcaatgacaagagcaggaagagcgagaaggtgaaggtgattgacgtgactgtgcccctgcagtgcctggtgaaggactcgaagctcatcctcacggaggcctccaaggctgggctgcctggcttttatgacccgctcctgcaggtccagcgtcctcacaggaacaccagggcctgtgctccggagccttccttcagacccttcctccacgtgcccacttgggatgcagaatgcagcggagctaggaccccctccacggcctggacctcggctgcagtaaagttacgtgaggcctgtctctcggggcctggaagtggcagccatcagttgctcttgctgacccctcggagcaagcgccgcacaggtggtggctgagacagctggcgcggggggccccaagctgcgccggcctccagcccacccacagctgttgctgaagtcaggccaacctccccagcactggtatctgagtaacggctaagaacctccttcctctggttttgaaaagcagttcgggttgtccaattctgtaacattcatctccattttttaaaaaggtttctctgacggccccacggcccgagccgcggtgagcgtcgtgttgcatgagcctgggccccgggcttcccgtgcgcctctgccgcaggtgcttctgggcacccatcctctgcgtttcatttgcagtcgactgtacanaangcactccccacaataaaccttttcctgaaancaaaagctggcaaaanaaaaanaaaanannnnnnnnnnnnnnnnnnnnn

SEQ ID NO: 234 - DNA, 899 bp, Homo Sapiens
catcaccatcaccatcacggatcctatttaggtgacactatagaatcgtcgacccacgcgtccgcgccggggccgggcggccggcgcccccggctgctcccgccgccgcccggacccgcgccccgccggggcagcggtggtgagagccccgactccccggacgccgcccgccgtgccatggggttcccggccgcggcgctgctctgcgcgctgtgctgcggcctcctggccccggctgcccgcgccggctactccgaggagcgctgcagctggaggggcagcggcctcacccaggagcccggcagcgtggggcagctggccctggcctgtgcggagggcgcggttgagtggctgtacccggctggggcgctgcgcctgaccctgggcggccccgatcccagagcgcggcccggcatcgcctgtctgcggccggtgcggcccttcgcgggcgcccaggtcttcgcggagcgcgcagggggcgccctggagctgctgctggccgagggcccgggcccggcagggggccgctgcgtgcgctggggtccccgcgagcgccgggccctcttcctgcaggccacgccgcaccaggacatcagccgccgcgtggccgccttccgctttgagctgcgcgaggacgggcgccccgagctgcccccgcaggcccacggtctcggcgtagacggtgcctgcaggccctgcagcgacgctgagctgctcctggccgcatgcaccagcgacttcgtaattcacgggatcatccatggggtcacccatgacgtggagctgcaggagtctgtcatcactgtggtggccgcccgtgtcctccgccagacaccgccgctgttccaggcggggcgatccggggaccaggggctgacctccattcgtaccccactgcg

SEQ ID NO: 235 - DNA, 1223 bp, Homo Sapiens
  misc_feature (915)..(915): n is a, c, g, or t
  misc_feature (949)..(949): n is a, c, g, or t
  misc_feature (963)..(963): n is a, c, g, or t
  misc_feature (969)..(969): n is a, c, g, or t
  misc_feature (998)..(998): n is a, c, g, or t
  misc_feature (1006)..(1006): n is a, c, g, or t
  misc_feature (1023)..(1023): n is a, c, g, or t
  misc_feature (1026)..(1027): n is a, c, g, or t
  misc_feature (1030)..(1030): n is a, c, g, or t
  misc_feature (1050)..(1050): n is a, c, g, or t
  misc_feature (1052)..(1052): n is a, c, g, or t
  misc_feature (1062)..(1062): n is a, c, g, or t
  misc_feature (1069)..(1069): n is a, c, g, or t
  misc_feature (1075)..(1076): n is a, c, g, or t
  misc_feature (1086)..(1086): n is a, c, g, or t
  misc_feature (1093)..(1093): n is a, c, g, or t
  misc_feature (1098)..(1098): n is a, c, g, or t
  misc_feature (1104)..(1104): n is a, c, g, or t
  misc_feature (1124)..(1125): n is a, c, g, or t
  misc_feature (1127)..(1127): n is a, c, g, or t
  misc_feature (1133)..(1133): n is a, c, g, or t
  misc_feature (1135)..(1135): n is a, c, g, or t
  misc_feature (1138)..(1138): n is a, c, g, or t
  misc_feature (1155)..(1155): n is a, c, g, or t
  misc_feature (1158)..(1158): n is a, c, g, or t
  misc_feature (1170)..(1171): n is a, c, g, or t
  misc_feature (1177)..(1177): n is a, c, g, or t
  misc_feature (1179)..(1179): n is a, c, g, or t
  misc_feature (1187)..(1187): n is a, c, g, or t
  misc_feature (1189)..(1190): n is a, c, g, or t
  misc_feature (1195)..(1195): n is a, c, g, or t
  misc_feature (1200)..(1200): n is a, c, g, or t
  misc_feature (1207)..(1207): n is a, c, g, or t
  misc_feature (1211)..(1211): n is a, c, g, or t
  misc_feature (1217)..(1217): n is a, c, g, or t
  misc_feature (1220)..(1220): n is a, c, g, or t
tagagaaattactatgagaggatcgcatcaccatcaccatcacggatcctatttaggtgacactatagaatcgtcgacccacgcgtccgcgatgccgaaacgaaagaagcagaatcatcaccagccaccgacacagcagcagcccccgctgcccgagcgggaagagactggagatgaggaggatgggagtcccatcgctcttcacagaggtcctccaggatcaaggggaccactgattccaccactgctgagtctcccacctcctccttggggtagaggcccaattcggagagggcttggccccaggtctagcccatatggtcgtggttggtggggagtcaatgcagaacctccttttccggggccaggccatgggggtcccaccaggggaagctttcacaaggaacagagaaaccctcgaaggctcaaaagctggtctcttatcaagaatacctgcccgcccaaggatgacccccaggttatggaagacaaatccgaccgccctgtctgccgacattttgccaaaaagggccactgtcgatatgaggacctctgtgccttctaccatccaggcgtcaatggacctcctctgtgagactgtgccttcccatccaggctggaaggagctctctgtgacctagcggccatttatttctctgtagccctatgatggctactgtgaggctcttctaacaccctcagtcagtgacacacccatcccatccaccacttcccccgtgtggggtccagagtggtgttgcatcactggtgcgcggcatacgcgctttcttctgatccagcctgtagagactcgcctttgggacccatctttgcttcctttcagttgcctcctggatcttctttcccgtcatcaaatgactgctgaacaggaaaacctctttggtgctgtttctngtgcatctgtccacctgttccccagtatgccctncaattcctgaaaanccctgnaacggtttcctaacattcccttcttttanctgcttgnttttaagtccttttttnttnnganattccctacccccaatgttntncacctgcttntgaaaantcaccnngttttttaanctggggnccaanttgggngaatgggtgcaaatttcttnntnaaaagncnctncccccgcccttggattncanaatttccctgcnnaaaaangntccccccncnntggtnttttntaacccngggnttttgnaantgg

SEQ ID NO: 236 - DNA, 746 bp, Homo Sapiens
  misc_feature (716)..(717): n is a, c, g, or t
  misc_feature (724)..(724): n is a, c, g, or t
  misc_feature (726)..(729): n is a, c, g, or t
  misc_feature (733)..(737): n is a, c, g, or t
  misc_feature (739)..(746): n is a, c, g, or t
tagagaaattactatgagaggatcgcatcaccatcaccatcacggatcctatttaggtgacactatagaatcgtcgacccacgcgtccggctcgcgagccctggcgtcgcgtaggagggaggatggagagcggcgacgaagcggccatcgagaggcaccgcgtccacttgcgctccgccacattgcgcgacgccgtacccgccacactgcatctgctgccctgcgaggttgcggtggacgggcccgccccggtggggcgcttcttcacgcccgccatccgccagggccccgagggactcgaagtgtcgtttcggggccgctgtctacggggagaggaggtggcggtgccgcctggcctcgtgggatacgtgatggtgacagaagagaagaaggtgtcgatggggaagccagaccccttgcgggattccgggactgacgaccaagaggaggagccgctggagcgggacttcgaccgcttcattggagccactgccaacttcagccgcttcaccctgtggggtctggagaccatccctggcccggatgccaaagtgcgtggggccttaacttggcccagccttgcggcagcgattcacgcacaggtgcccgaggactgagaaccagagcttgaaattcaaagctgcgatcccttcacagcagtaaaccagctctttggaaccgattccatcaccccaataaaggagctcttcacagcnnaaaaaanannnnaaannnnnannnnnnnn

SEQ ID NO: 237 - DNA, 1138 bp, Homo Sapiens
  misc_feature (922)..(922): n is a, c, g, or t
  misc_feature (927)..(927): n is a, c, g, or t
  misc_feature (943)..(943): n is a, c, g, or t
  misc_feature (945)..(945): n is a, c, g, or t
  misc_feature (952)..(952): n is a, c, g, or t
  misc_feature (955)..(955): n is a, c, g, or t
  misc_feature (987)..(987): n is a, c, g, or t
  misc_feature (1011)..(1011): n is a, c, g, or t
  misc_feature (1019)..(1019): n is a, c, g, or t
  misc_feature (1022)..(1022): n is a, c, g, or t
  misc_feature (1026)..(1026): n is a, c, g, or t
  misc_feature (1030)..(1030): n is a, c, g, or t
  misc_feature (1033)..(1033): n is a, c, g, or t
  misc_feature (1050)..(1050): n is a, c, g, or t
  misc_feature (1052)..(1052): n is a, c, g, or t
  misc_feature (1060)..(1060): n is a, c, g, or t
  misc_feature (1070)..(1070): n is a, c, g, or t
  misc_feature (1072)..(1072): n is a, c, g, or t
  misc_feature (1075)..(1075): n is a, c, g, or t
  misc_feature (1085)..(1086): n is a, c, g, or t
  misc_feature (1095)..(1095): n is a, c, g, or t
  misc_feature (1111)..(1111): n is a, c, g, or t
  misc_feature (1116)..(1116): n is a, c, g, or t
  misc_feature (1118)..(1119): n is a, c, g, or t
  misc_feature (1122)..(1122): n is a, c, g, or t
  misc_feature (1126)..(1126): n is a, c, g, or t
  misc_feature (1137)..(1138): n is a, c, g, or t
atagagaaattactatgagaggatcgcatcaccatcaccatcacggatcctatttaggtgacactatagaatcgtcgacccacgcgtccggcacggagctcaaccaccttggctaccagtttgtgcagagagtgtttgagaagcacgaccaggaccgcgacggcgccctctcgcccgtggagctgcaaagccttttcagtgtgttcccagcagcgccctggggccccgagctcccacgcacagtccgcacagaggccggccggttgcccctgcacggatacctctgccagtggaccctggtgacctacctggacgtccggagctgccttggacacctaggctacctgggctaccccaccctctgtgagcaggaccaggcccatgccatcacagtcactcgtgagaagaggctggaccaggagaagggacagacgcagcggagcgtcctcctgtgcaaggtggtaggggcccgtggagtgggcaagtctgccttcctgcaggcctttctcggccgcggcctggggcaccaggacacgagggagcagcctcccggctacgccatcgacacggtgcaggtcaatggacaggagaagtacttgatcctctgtgaggtgggcacagatggtctgctggccacatcgctggacgccacctgtgacgttgcctgcttgatgtttgatggcagtgacccaaagtcctttgcacattgtgccagcgtctacaagcaccattacatggacgggcagaccccctgcctctttgtctcctccaaggccgacctgcccgaaggtgtcgcggtgtctggcccatcaccggccgagttttgccgcaagcaccggctacccgctcccgtgccgttctcctgtgctggcccagccgagcccagcaccaccatcttcacccagctcgccacatggccgcnttccnacatttggtcacgcananctgcatnccntcttccttttggctccgggggctgctgggggnttgtcggggcccccctggccccantccttaanttntcantttnaangggtcctggtgaaaaancnagtgaagncccttggtancnaanccccctcccnnaactgggtntgcctccttgctgggnctttncnnggnaaanaaaattggggnn

SEQ ID NO: 238 - DNA, 1179 bp, Homo Sapiens
  misc_feature (896)..(896): n is a, c, g, or t
  misc_feature (925)..(925): n is a, c, g, or t
  misc_feature (937)..(937): n is a, c, g, or t
  misc_feature (988)..(988): n is a, c, g, or t
  misc_feature (996)..(996): n is a, c, g, or t
  misc_feature (998)..(998): n is a, c, g, or t
  misc_feature (1009)..(1009): n is a, c, g, or t
  misc_feature (1031)..(1031): n is a, c, g, or t
  misc_feature (1053)..(1053): n is a, c, g, or t
  misc_feature (1056)..(1056): n is a, c, g, or t
  misc_feature (1059)..(1059): n is a, c, g, or t
  misc_feature (1067)..(1067): n is a, c, g, or t
  misc_feature (1071)..(1071): n is a, c, g, or t
  misc_feature (1077)..(1077): n is a, c, g, or t
  misc_feature (1105)..(1105): n is a, c, g, or t
  misc_feature (1107)..(1107): n is a, c, g, or t
  misc_feature (1109)..(1110): n is a, c, g, or t
  misc_feature (1119)..(1119): n is a, c, g, or t
  misc_feature (1124)..(1124): n is a, c, g, or t
  misc_feature (1133)..(1133): n is a, c, g, or t
  misc_feature (1146)..(1146): n is a, c, g, or t
  misc_feature (1152)..(1153): n is a, c, g, or t
  misc_feature (1158)..(1158): n is a, c, g, or t
  misc_feature (1162)..(1162): n is a, c, g, or t
  misc_feature (1170)..(1170): n is a, c, g, or t
tagagaaattactatgagaggatcgcatcaccatcaccatcacggatcctatttaggtgacactatagaatcgtcgacccacgcgtccgcctcgttggctttaccttggttcgcggtcgtccttggttatcgtgagcgtccgcgagtctctgggaggccaagcctaggggcgccacagcgcctgcgcgcgtacggcggccggaaggggctagaggcggctccctgggtgacaaccgcgcgccccacctttccccacgtggccgcgaagaccggcacctgtgcactgagtgcctgctgcgtgtcgggccccgtcctaggcagtggggacaaggaggctacagggtacaaataaatgagtgaacgatgttgctctagatacagctcaggagcatctatcggctgcacgccaacatcaacacaggcgaagatggtctccaagcgcattgcccaggagacctttgatgcagctgtgcgcgagaacatcgaggagtttgcgatggggccagaggaggcagtgaaagaggccgtggagcagtttgaatcgcaaggggttgatctgagcaacattgtaaagacggcacctaaagtctctgcagacggatcccaggagcccacacatgacatcctgcagatgctcagtgacctccaggagtctgtggccagctctcgcccccaggaggtgtcagcatacctcacccgcttctgcgaccagtgcaaacaggacaaggcctgccgcttcctcgcggcccagaagggggcctaccccatcatcttcactgcctggaagctggccactgcaggtgaccagggccttctgctccagtccctcaatgccctgccggtgctgactgatggacagccagacctcctggatgcccagggcctgcagctcctantggccacgctgacccaaaatgctgatgangctgacctgacntgctctgggaatccgctgtgtgcgtcacgcttgcctgaaacatgaacaaantcggcaananctggtgaaaanctggcgtgctgcctctgctgantggtgccatcacccatcatggnccnccnactgaacntggntcaggnaaacctgctgggccctgcgtgtcatgancntnnaaaaaaaanatccngggggcccntttggccatgccnaaaacnntgccnaaanaaattttncaagaaaaa

SEQ ID NO: 239 - DNA, 700 bp, Homo Sapiens
  misc_feature (4)..(4): n is a, c, g, or t
  misc_feature (696)..(697): n is a, c, g, or t
  misc_feature (700)..(700): n is a, c, g, or t
caanagagaaattactatgagaggatcgcatcaccatcaccatcacggatcctatttaggtgacactatagaatcgtcgacccacgcgtccgagaggataaacaactggaaggagagcaagcacaaagtcatcatggcttcagcgtctgctcgtggaaaccaagataaagatgcccattttccaccaccaagcaagcagagcctgttgttttgtccaaaatcaaaactgcacatccacagagcagagatctcaaagattatgcgagaatgtcaggaagaaagtttctggaagagagctctgcctttttctcttgtaagcatgcttgtcacccagggactagtctaccaaggttatttggcagctaattctagatttggatcattgcccaaagttgcacttgctggtctcttgggatttggccttggaaaggtatcatacataggagtatgccagagtaaattccatttttttgaagatcagctccgtggggctggttttggtccacagcataacaggcactgcctccttacctgtgaggaatgcaaaataaagcatggattaagtgagaagggagactctcagccttcagcttcctaaattctgtgtctgtgactttcgaagttttttaaacctctgaatttgtacacatttaaaatttcaagtgtactttaaaataaaatacttctaatggaacnnaan

SEQ ID NO: 240 - DNA, 1208 bp, Homo Sapiens
  misc_feature (1)..(1): n is a, c, g, or t
  misc_feature (855)..(855): n is a, c, g, or t
  misc_feature (883)..(883): n is a, c, g, or t
  misc_feature (978)..(978): n is a, c, g, or t
  misc_feature (1016)..(1016): n is a, c, g, or t
  misc_feature (1043)..(1043): n is a, c, g, or t
  misc_feature (1047)..(1047): n is a, c, g, or t
  misc_feature (1057)..(1057): n is a, c, g, or t
  misc_feature (1071)..(1071): n is a, c, g, or t
  misc_feature (1084)..(1084): n is a, c, g, or t
  misc_feature (1109)..(1109): n is a, c, g, or t
  misc_feature (1117)..(1117): n is a, c, g, or t
  misc_feature (1129)..(1129): n is a, c, g, or t
  misc_feature (1136)..(1138): n is a, c, g, or t
  misc_feature (1145)..(1145): n is a, c, g, or t
  misc_feature (1148)..(1148): n is a, c, g, or t
  misc_feature (1159)..(1160): n is a, c, g, or t
  misc_feature (1162)..(1162): n is a, c, g, or t
  misc_feature (1179)..(1179): n is a, c, g, or t
  misc_feature (1185)..(1185): n is a, c, g, or t
  misc_feature (1192)..(1192): n is a, c, g, or t
  misc_feature (1200)..(1201): n is a, c, g, or t
  misc_feature (1203)..(1203): n is a, c, g, or t
  misc_feature (1205)..(1206): n is a, c, g, or t
naatagagaaattactatgagaggatcgcatcaccattcaccatcacggatcctatttaggtgacactatagaatcgtcgacccacgcgtccggcccgcagacctcgctcaggagcgggagggccgctctgcgagagctccgaagccgtgagaacttcctcagcaagctcaaccgggagctgatcgagaccatccaggagatggagaacagcacgaccctgcacgtgcgggccctgctgcagcagcaggacaccctggcgaccatcatcgacatcttggagtactcaaacaagaagaggctgcagcaattgaaatctgagcttcaggagtgggaagaaaagaagaaatgcaagatgagctatcttgagaagacccaggaggaagtgaacttcctgagcacttacatggaccatgagtattccatcaagtctgtccagatctccactcttatgcgccagctgcagcaggttaaggacagccagcaggatgagctggatgacctcggtgagatgcgcagaaaggtcctggaatccttgtccgacaagattcagaagaagaagaaaaaaattctgagttctgtggtggcggaaacccagcgtccctatgaagaggctctcctacagaagatgtgggaaagccaggacttcctgaaatgcatgcaaaggttcagagaatttattgaccagtttgaggagaacatgcctgtattaagggccgaggtggaagagctccaagcccagacccgggaaccccgagaggtcatatttgaggatgttctgcttcggagacccaagtgcaccccagacatggatgtcatcctcaacattcctgtggaagagccactaccccttctanatggcagtgccatgggccgccctccccntcctgctctcttccagcacctggagccttggatcatttacttccaggaccggatctccattcaaccctgatctaaagtctccctgctccctctgncctttcctcctctttctttccttccttccttccctccntttttccccctttcccttccctcctcnttcnttccttcttntccttcctccctcntttttttcttccnggggttttttccccccttcttcccntcctttcnggttggggcctncgggccnnntgggaanttncaaaaaacccnncnattctttttttcccaanaaaccnggatttncttttaannanannaa

SEQ ID NO: 241 - DNA, 1275 bp, Homo Sapiens
  misc_feature (932)..(932): n is a, c, g, or t
  misc_feature (940)..(940): n is a, c, g, or t
  misc_feature (965)..(965): n is a, c, g, or t
  misc_feature (978)..(978): n is a, c, g, or t
  misc_feature (996)..(996): n is a, c, g, or t
  misc_feature (1006)..(1006): n is a, c, g, or t
  misc_feature (1012)..(1012): n is a, c, g, or t
  misc_feature (1024)..(1024): n is a, c, g, or t
  misc_feature (1032)..(1032): n is a, c, g, or t
  misc_feature (1048)..(1048): n is a, c, g, or t
  misc_feature (1056)..(1056): n is a, c, g, or t
  misc_feature (1061)..(1061): n is a, c, g, or t
  misc_feature (1077)..(1077): n is a, c, g, or t
  misc_feature (1080)..(1080): n is a, c, g, or t
  misc_feature (1089)..(1089): n is a, c, g, or t
  misc_feature (1095)..(1095): n is a, c, g, or t
  misc_feature (1098)..(1098): n is a, c, g, or t
  misc_feature (1118)..(1118): n is a, c, g, or t
  misc_feature (1138)..(1138): n is a, c, g, or t
  misc_feature (1143)..(1143): n is a, c, g, or t
  misc_feature (1146)..(1146): n is a, c, g, or t
  misc_feature (1152)..(1152): n is a, c, g, or t
  misc_feature (1156)..(1156): n is a, c, g, or t
  misc_feature (1171)..(1171): n is a, c, g, or t
  misc_feature (1173)..(1173): n is a, c, g, or t
  misc_feature (1192)..(1192): n is a, c, g, or t
  misc_feature (1210)..(1210): n is a, c, g, or t
  misc_feature (1212)..(1212): n is a, c, g, or t
  misc_feature (1219)..(1219): n is a, c, g, or t
  misc_feature (1224)..(1224): n is a, c, g, or t
  misc_feature (1226)..(1226): n is a, c, g, or t
  misc_feature (1232)..(1232): n is a, c, g, or t
  misc_feature (1239)..(1239): n is a, c, g, or t
  misc_feature (1245)..(1245): n is a, c, g, or t
  misc_feature (1257)..(1257): n is a, c, g, or t
  misc_feature (1266)..(1267): n is a, c, g, or t
  misc_feature (1269)..(1269): n is a, c, g, or t
  misc_feature (1273)..(1274): n is a, c, g, or t
aatagagaaattactatgagaggatcgcatcaccatcaccatcacggatcctatttaggtgacactatagaatcgtcgacccacgcgtccggccatgaatcggggcatgacagaaggagtaacgctgttaatcctggcagtgcagactgggctgatagaactgcaggttgttcatcgggcattcttgctcagtattatccttttcattgtcgtagcttctatcctacagtctatgttagaaattgcagatcctattgttttggcactgggagcatctagagacaagagcttgtggaaacacttccgtgctgtaagcctttgtttatttttattggtattccctgcttatatggcttatatgatttgccagtttttccacatggatttttggcttcttatcattatttccagcagcattcttacctctcttcaggttctgggaacactttttatttatgtcttatttatggttgaggaattcagaaaagagccagtggaaaacatggatgatgtcatctactatgtgaatggcacttaccgcctgctggagtttcttgtggccctctgtgtggtggcctatggcgtctcagagaccatctttggagaatggacagtgatgggctcaatgatcatcttcattcattcctactataacgtgtggcttcgggcccagctggggtggaagagctttcttctccgcagggatgctgtgaataagattaaatcgttacccattgctacgaaagagcagcttgagaaacacaatgatatttgtgccatctgttatcaggacatgaaatctgctgtgatcacgccttgcagtcattttttccatgcaggctgtcttaagaaatggctgtatgtccaggaaaacctgcccctctgtgccactggccatctgaaaaaactcctcccagcttccaggaataagnaactgaanccagttctacagccctcatgctggnacctgaaccaaancgtcatggttccaggaanggtactgaancccccnggcccaggaacnatactccnggggaccaggaaaacngggaaggntcccngggacaaaaaatggantancttggcccnaaccanccnaaaaaacccggaaaggggcnttttggacccccaaaaaaantcccnccnaggggnaaanaaaaaaacccatccngnggaaaaccccccctaaagnaaaaaccccccggaaagnanccttttnaaacncncggggngaaaaanttaccnccaaaagggaantccggtttnnantttnng

SEQ ID NO: 242 - DNA, 994 bp, Homo Sapiens
  misc_feature (792)..(792): n is a, c, g, or t
  misc_feature (920)..(920): n is a, c, g, or t
  misc_feature (922)..(922): n is a, c, g, or t
  misc_feature (925)..(925): n is a, c, g, or t
  misc_feature (938)..(938): n is a, c, g, or t
  misc_feature (943)..(943): n is a, c, g, or t
  misc_feature (948)..(948): n is a, c, g, or t
  misc_feature (963)..(963): n is a, c, g, or t
  misc_feature (966)..(969): n is a, c, g, or t
  misc_feature (977)..(977): n is a, c, g, or t
  misc_feature (986)..(986): n is a, c, g, or t
  misc_feature (988)..(988): n is a, c, g, or t
  misc_feature (991)..(991): n is a, c, g, or t
  misc_feature (993)..(993): n is a, c, g, or t
taatagagagattactatgagaggatcgcatcaccatcaccatcacggatcctatttaggtgacactatagaatcgtcgacccacgcgtccgatctcagacggcacacagctcgtaagtcctccatcaaagctgcagttccaggaaacacttctacccccagctgccagagcaccaacgggcagcctcagaggggagcctgtgggagatggagaggtagatcccgtagccggcgggcggcgacgtcccgaccagagcgtgtgtggcccgatggggtcatcccctttgtcattgggggaaacttcactggtagccagagggcagtcttccggcaggccatgaggcactgggagaagcacacctgtgtcaccttcctggagcgcactgacgaggacagctatattgtgttcacctatcgaccttgcgggtgctgctcctacgtgggtcgccgcggcgggggcccccaggccatctccatcggcaagaactgtgacaagttcggcattgtggtccacgagctgggccacgtcgtcggcttctggcacgaacacactcggccagaccgggaccgccacgtttccatcgttcgtgagaacatccagccagggcaggagtataacttcctgaagatggagcctcaggaggtggagtccctgggggagacctatgacttcgacagcatcatgcattacgctcggaacacattctccaggggcatcttcctggataccattgtccccaagtatgaggtgaacggggtgaaacctcccattggccaaaggacacggctcancaagggggacattgcccaagcccgcaagctttacaagtgcccagcctgtggagagaccctgcaagacagcacaggcaacttctcctcccctgaataccccaatggctactctgctcaatgcactgcgngnggngcatctctgtcanacccnggganaaaatcatcctgaanttnnnntcctgganctgtaccgnanccncnt

SEQ ID NO: 243 - DNA, 616 bp, Homo Sapiens
  misc_feature (37)..(37): n is a, c, g, or t
  misc_feature (39)..(39): n is a, c, g, or t
  misc_feature (46)..(46): n is a, c, g, or t
  misc_feature (97)..(97): n is a, c, g, or t
  misc_feature (112)..(112): n is a, c, g, or t
  misc_feature (115)..(115): n is a, c, g, or t
  misc_feature (243)..(243): n is a, c, g, or t
  misc_feature (384)..(384): n is a, c, g, or t
  misc_feature (475)..(475): n is a, c, g, or t
  misc_feature (508)..(508): n is a, c, g, or t
  misc_feature (515)..(515): n is a, c, g, or t
  misc_feature (522)..(522): n is a, c, g, or t
  misc_feature (530)..(530): n is a, c, g, or t
  misc_feature (541)..(541): n is a, c, g, or t
  misc_feature (546)..(546): n is a, c, g, or t
  misc_feature (552)..(552): n is a, c, g, or t
  misc_feature (557)..(558): n is a, c, g, or t
  misc_feature (576)..(577): n is a, c, g, or t
  misc_feature (579)..(580): n is a, c, g, or t
  misc_feature (586)..(586): n is a, c, g, or t
  misc_feature (591)..(591): n is a, c, g, or t
  misc_feature (595)..(595): n is a, c, g, or t
  misc_feature (597)..(598): n is a, c, g, or t
  misc_feature (602)..(602): n is a, c, g, or t
  misc_feature (607)..(607): n is a, c, g, or t
gagagattactatgagaggatcgcatcaccatcaccntnacggatnctatttaggtgacactatagaatcgtcgacccacgcgtccgtgcgctgtgntcgaggggtgccggncangcctgagcgagcgagctagccagcaggcatcgagggggcgcggctgccgtccggacgagacaggcgaacccgacgcataagagtccaccaccggacagccagcacatccacgatggagcgtcttgtcncccgtgggaccttcccagtactagtgcgcaccagcgcctgccgcagcctcttcgggccggtggaccacgaggagctgagccgcgagctgcaggcccgcctggccgagctgaacgccgaggaccagaaccgctgggattacnacttccagcaggacatgccgctgcggggccctggacgcctgcagtggaccgaagtggacagcgactcggtgcccgcgttctaccgcgaganggtgcaggtggggcgctgccgcctgctgctggngccgcgncccgtcncggtcgcngtggttgtcancccgnccctcnagccnnccgctgattctctcgaanngnntctagnacgcnccgnannaagnttccntagtgaccc

SEQ ID NO: 244 - DNA, 1194 bp, Homo Sapiens
  misc_feature (4)..(4): n is a, c, g, or t
  misc_feature (16)..(16): n is a, c, g, or t
  misc_feature (18)..(18): n is a, c, g, or t
  misc_feature (21)..(21): n is a, c, g, or t
  misc_feature (49)..(49): n is a, c, g, or t
  misc_feature (674)..(674): n is a, c, g, or t
  misc_feature (721)..(721): n is a, c, g, or t
  misc_feature (789)..(789): n is a, c, g, or t
  misc_feature (799)..(799): n is a, c, g, or t
  misc_feature (801)..(801): n is a, c, g, or t
  misc_feature (828)..(828): n is a, c, g, or t
  misc_feature (873)..(873): n is a, c, g, or t
  misc_feature (898)..(898): n is a, c, g, or t
  misc_feature (901)..(901): n is a, c, g, or t
  misc_feature (970)..(970): n is a, c, g, or t
  misc_feature (972)..(972): n is a, c, g, or t
  misc_feature (980)..(980): n is a, c, g, or t
  misc_feature (982)..(982): n is a, c, g, or t
  misc_feature (988)..(988): n is a, c, g, or t
  misc_feature (992)..(992): n is a, c, g, or t
  misc_feature (994)..(994): n is a, c, g, or t
  misc_feature (1002)..(1002): n is a, c, g, or t
  misc_feature (1012)..(1012): n is a, c, g, or t
  misc_feature (1014)..(1014): n is a, c, g, or t
  misc_feature (1024)..(1024): n is a, c, g, or t
  misc_feature (1030)..(1030): n is a, c, g, or t
  misc_feature (1037)..(1037): n is a, c, g, or t
  misc_feature (1042)..(1042): n is a, c, g, or t
  misc_feature (1051)..(1051): n is a, c, g, or t
  misc_feature (1057)..(1058): n is a, c, g, or t
  misc_feature (1065)..(1065): n is a, c, g, or t
  misc_feature (1070)..(1070): n is a, c, g, or t
  misc_feature (1088)..(1088): n is a, c, g, or t
  misc_feature (1096)..(1096): n is a, c, g, or t
  misc_feature (1105)..(1105): n is a, c, g, or t
  misc_feature (1122)..(1123): n is a, c, g, or t
  misc_feature (1128)..(1130): n is a, c, g, or t
  misc_feature (1134)..(1134): n is a, c, g, or t
  misc_feature (1137)..(1137): n is a, c, g, or t
  misc_feature (1143)..(1143): n is a, c, g, or t
  misc_feature (1159)..(1159): n is a, c, g, or t
  misc_feature (1163)..(1163): n is a, c, g, or t
  misc_feature (1171)..(1171): n is a, c, g, or t
  misc_feature (1175)..(1175): n is a, c, g, or t
  misc_feature (1179)..(1179): n is a, c, g, or t
ttanagaaaattactntnagnaggatgcattcaccatcaccatcacggnatcctatttaggtgacactatagaatcgtcgacccacgcgtccggctgcctgcaagcttcgatgcacgggaacaatggccacagtgtcccaccatcaaagagatcagagaccagggctcctgtggctcctgctgggccttcggggctgtggaagccatctctgaccggatctgcatccacaccaatgcgcacgtcagcgtggaggtgtcggcggaggacctgctcacatgctgtggcagcatgtgtggggacggctgtaatggtggctatcctgctgaagcttggaacttctggacaagaaaaggcctggtttctggtggcctctatgaatcccatgtagggtgcagaccgtactccatccctccctgtgagcaccacgtcaacggctcccggcccccatgcacgggggagggagatacccccaagtgtagcaagatctgtgagcctggctacagcccgacctacaaacaggacaagcactacggatacaattcctacagcgtctccaatagcgagaaggacatcatggccgagatctacaaaaacggccccgtggagggagctttctctgtgtattcggacttcctgctctacaagtcaggagtgtaccaacacgtcaccgganagatgatgggtggccatgccatccgcatcctgggctggggagtgganaatggcacaccctactggctggttgccaactccctggaacactgactggggtgacaatggcttctttnaaatactcanangacaggatcactgtggaatcgaatcanaagtggtggctggaattccacgcaccgatcagtactggggaaaanatctaatctgccgtgggccttgtcntgncaatccctgggggcgaaatcggggtaaaaatgcattttattctttaagttcacgtaaaaaacaagtttnangcagggtntnaaagantggnantggccaanatcaaacctntnttccaaaganaacaantcctggntaatnccaacctgnggttanntgcaaanagccntttgaaaccaccctttcnaaaaaaanggttctttncccctgtaaaaaatgcnntaagnnnactnctncccacnaattgggccccccccngtancttccctncccnggancaaaaaaaacccgga

SEQ ID NO: 245 - DNA, 1158 bp, Homo Sapiens
  misc_feature (1)..(1): n is a, c, g, or t
  misc_feature (873)..(873): n is a, c, g, or t
  misc_feature (879)..(879): n is a, c, g, or t
  misc_feature (906)..(906): n is a, c, g, or t
  misc_feature (972)..(972): n is a, c, g, or t
  misc_feature (1021)..(1021): n is a, c, g, or t
  misc_feature (1025)..(1025): n is a, c, g, or t
  misc_feature (1046)..(1046): n is a, c, g, or t
  misc_feature (1053)..(1053): n is a, c, g, or t
  misc_feature (1062)..(1062): n is a, c, g, or t
  misc_feature (1068)..(1068): n is a, c, g, or t
  misc_feature (1070)..(1070): n is a, c, g, or t
  misc_feature (1076)..(1076): n is a, c, g, or t
  misc_feature (1082)..(1082): n is a, c, g, or t
  misc_feature (1093)..(1093): n is a, c, g, or t
  misc_feature (1097)..(1097): n is a, c, g, or t
  misc_feature (1109)..(1109): n is a, c, g, or t
  misc_feature (1113)..(1113): n is a, c, g, or t
  misc_feature (1130)..(1130): n is a, c, g, or t
  misc_feature (1134)..(1134): n is a, c, g, or t
  misc_feature (1137)..(1139): n is a, c, g, or t
  misc_feature (1144)..(1145): n is a, c, g, or t
  misc_feature (1147)..(1147): n is a, c, g, or t
  misc_feature (1149)..(1149): n is a, c, g, or t
  misc_feature (1154)..(1156): n is a, c, g, or t
naaatagagagaattactatgagaggatcgcatcaccatcaccatcacggatcctatttaggtgacactatagaatcgtcgacccacgcgtccgcggacgcgtgggcgcagctgtaccactcgccagcgcgacggttcggaggccccgttcaccaccaggcgcagagattcaggttctcccccatgggcgtcgatcacatgagcgggctctctggcgtcaacgtgccaggaaacgcctcctccggctggtgcattttcatctacaacctggggcaggatgccgacgaggggatcctctggcagatgtttgggccgtttggtgccgtcaccaatgtgaaagtgatccgcgacttcaacaccaacaagtgcaaagggtttggctttgtgaccatgacaaactatgaagaagccgcgatggccatagccagcctgaacggctaccgcctgggggacaaaatcttacaggtttccttcaaaaccaacaagtcccacaaataactcgctcatgcttttttttgtacggaatagataattaagagtgaaggagttgaaacttttcttgttagtgtacaactcattttgcgccaattttcacaagtgtttgtctttgtctgaatgagaagtgagaaggtttttatactctgggatgcaaccgacatgttcaaatgtttgaaatcccacaatgttagaccaatcttaagtttcgtaagttatttcctttaagatatatattaaacagaaatctaagtagaactgcattgactaaccagtccctctggatggtggtgaacctgaagcatgctttaacctctaagactgtctaacacgcgtttcattcaatgtctccacagactgggtagcaaaaaatcaccnttttanttttagtttttaatctaaagatgttanacagatgctgagtgtgcgttttctcaaccgcttcaacattgtaagcgatgtatgcttttggttganaggaagttccttttccaggcaggtcccgttgcccctcctgctcactcantccnggctctgccaatggtcctggnaaatggngggggcccntccagngnggggcncccctnggggccggggnccangggccccatggntggngggccctccaaaaaagnaaanaannngtttnntnanccccnnncc

SEQ ID NO: 246 - DNA, 891 bp, Homo Sapiens
  misc_feature (738)..(738): n is a, c, g, or t
  misc_feature (860)..(861): n is a, c, g, or t
  misc_feature (866)..(866): n is a, c, g, or t
  misc_feature (870)..(870): n is a, c, g, or t
  misc_feature (872)..(874): n is a, c, g, or t
  misc_feature (877)..(877): n is a, c, g, or t
  misc_feature (879)..(883): n is a, c, g, or t
  misc_feature (885)..(891): n is a, c, g, or t
aatagagagattactatgagaggatcgcatcaccatcaccatcacggatcctatttaggtgacactatagaatcgtcgacccacgcgtccgcaaggccatcgcgctcttcacgcccgacgcctgtggcctctcagacccggcccacgttgagagcctgcaggagaaggcgcaggtggccctcaccgagtatgtgcgggcgcagtacccgtcccagccccagcgcttcgggcgcctgctgctgcggctccccgccctgcgcgcggtccctgcctccctcatctcccagctgttcttcatgcgcctggtggggaagacgcccattgagacactgatcagagacatgctgctgtcggggagtaccttcaactggccctacggctcgggccagtgaccatgacggggccacgtgtgctgtggccaggcctgcagacagacctcaagggacagggaatgctgaggcctcgaggggcctcccggggcccaggactctggcttctctcctcagacttctattttttaaagactgtgaaatgtttgtcttttctgttttttaaatgatcatgaaaccaaaaagagactgatcatccaggcctcagcctcatcctccccaggacccctgtccaggatggagggtccaatcctaggacagccttgttcctcagcacccctagcatgaacttgtgggatggtggggttggcttccctggcatgatggacaaaggcctggcgtcggccanaggggctgctccagtgggcaggggtagctagcgtgtgccaggcagatcctctggacacgtaacctatgtcagacactacatgatgactcaaggccaaataataaagacatttcctacctgcnnaaaanaaanannnaanannnnnannnnnnn

SEQ ID NO: 247 - DNA, 1151 bp, Homo Sapiens
  misc_feature (891)..(891): n is a, c, g, or t
  misc_feature (968)..(968): n is a, c, g, or t
  misc_feature (974)..(979): n is a, c, g, or t
  misc_feature (981)..(981): n is a, c, g, or t
  misc_feature (983)..(983): n is a, c, g, or t
  misc_feature (985)..(985): n is a, c, g, or t
  misc_feature (987)..(987): n is a, c, g, or t
  misc_feature (1008)..(1008): n is a, c, g, or t
  misc_feature (1016)..(1017): n is a, c, g, or t
  misc_feature (1026)..(1026): n is a, c, g, or t
  misc_feature (1028)..(1028): n is a, c, g, or t
  misc_feature (1035)..(1035): n is a, c, g, or t
  misc_feature (1043)..(1043): n is a, c, g, or t
  misc_feature (1062)..(1062): n is a, c, g, or t
  misc_feature (1064)..(1064): n is a, c, g, or t
  misc_feature (1072)..(1072): n is a, c, g, or t
  misc_feature (1078)..(1078): n is a, c, g, or t
  misc_feature (1084)..(1084): n is a, c, g, or t
  misc_feature (1099)..(1099): n is a, c, g, or t
  misc_feature (1115)..(1115): n is a, c, g, or t
  misc_feature (1143)..(1144): n is a, c, g, or t
  misc_feature (1147)..(1147): n is a, c, g, or t
  misc_feature (1151)..(1151): n is a, c, g, or t
agaaataactatgagaggatcgcatcaccatcaccatcacggatcctatttaggtgacactatagaatcgtcgacccacgcgtccggctcctctgcctttgtgctctgttcctgtccagcaggggtctcccaacaagtgctctttccaccccaaaggggcctctccttttctccactgtcataatctctttccatcttacttgcccttctatactttctcacatgtggctccccctgaattttgcttcctttgggagctcattcttttcgccaaggctcacatgctccttgcctctgctctgtgcactcacgctcagcacacatgcatcctcccctctcctgcgtgtgcccactgaacatgctcatgtgtacacacgcttttcccgtatgctttcttcatgttcagtcacatgtgctctcgggtgccctgcattcacagctacgtgtgcccctctcatggtcatgggtctgcccttgagcgtgtttgggtaggcatgtgcaatttgtctagcatgctgagtcatgtctttcctatttgcacacgtccatgtttatccatgtactttccctgtgtaccctccatgtaccttgtgtactttcttcccttaaatcatggtattcttctgacagagccatatgtaccctaccctgcacattgttatgcacttttccccatctccattgcattcatgtactaccctcagtctacactcacaatcatcttctcccaagactgctcccttttgttttgtgtttttttgaggggaattaaggaaaaataagtgggggcaggtttggagagctgcttccagtggatagttgatgagaatcctgaccaaaggaaggcacccttgactgttgggatagacagatggacctatggggtgggangtggtgtccctttcacactgtggtgtctcttggggaaaggatctccccgaatctcaataaacaagtgaacagtgganaaaaannnnnnananananaaaaaaggggggccgctcccnaaaggganncgaaataancntaaatanctgaactngaaccccggtgaaaaaacnanaaagaccncaaaantccatnggaattgttcaaaancccggtgccccggggnttttatggggaaaaccaactaacttggnnaantttn

SEQ ID NO: 248 - DNA, 1155 bp, Homo Sapiens
  misc_feature (754)..(754): n is a, c, g, or t
  misc_feature (757)..(757): n is a, c, g, or t
  misc_feature (760)..(760): n is a, c, g, or t
  misc_feature (869)..(869): n is a, c, g, or t
  misc_feature (881)..(881): n is a, c, g, or t
  misc_feature (886)..(886): n is a, c, g, or t
  misc_feature (888)..(888): n is a, c, g, or t
  misc_feature (898)..(898): n is a, c, g, or t
  misc_feature (922)..(922): n is a, c, g, or t
  misc_feature (925)..(925): n is a, c, g, or t
  misc_feature (954)..(954): n is a, c, g, or t
  misc_feature (967)..(967): n is a, c, g, or t
  misc_feature (969)..(969): n is a, c, g, or t
  misc_feature (972)..(972): n is a, c, g, or t
  misc_feature (975)..(975): n is a, c, g, or t
  misc_feature (982)..(982): n is a, c, g, or t
  misc_feature (988)..(988): n is a, c, g, or t
  misc_feature (991)..(991): n is a, c, g, or t
  misc_feature (995)..(995): n is a, c, g, or t
  misc_feature (997)..(997): n is a, c, g, or t
  misc_feature (1006)..(1007): n is a, c, g, or t
  misc_feature (1011)..(1011): n is a, c, g, or t
  misc_feature (1013)..(1013): n is a, c, g, or t
  misc_feature (1027)..(1027): n is a, c, g, or t
  misc_feature (1047)..(1047): n is a, c, g, or t
  misc_feature (1051)..(1051): n is a, c, g, or t
  misc_feature (1062)..(1062): n is a, c, g, or t
  misc_feature (1078)..(1078): n is a, c, g, or t
  misc_feature (1094)..(1094): n is a, c, g, or t
  misc_feature (1098)..(1098): n is a, c, g, or t
  misc_feature (1103)..(1103): n is a, c, g, or t
  misc_feature (1108)..(1108): n is a, c, g, or t
  misc_feature (1117)..(1117): n is a, c, g, or t
  misc_feature (1120)..(1120): n is a, c, g, or t
  misc_feature (1131)..(1131): n is a, c, g, or t
  misc_feature (1138)..(1138): n is a, c, g, or t
  misc_feature (1141)..(1141): n is a, c, g, or t
  misc_feature (1145)..(1145): n is a, c, g, or t
tagagaaattactatgagaggatcgcatcaccatcaccatcacggatcctatttaggtgacactatagaatcgtcgacccacgcgtccgcccacgcgtccggtgaactggctacatgctctccccgtgacggggccggagctgggctggggacaccccctggaggtgacgtctgctcctctgattccttcaacgaggacatcgctgcctttgccaagcaggttcgctctgagaggcccctcttctcctccaacccagaactggacaatctgatgatccaggccatccaggtgctgcggttccacctgctggagctggagaaggtccacgacctgtgcgacaacttctgtcaccgctacatcacctgcctcaagggaaagatgcccatcgacctggtcatcgaggatcgggacggcggctgcagggaggacttcgaggactacccagcctcctgccccagcctcccagaccagaataatatgtggattcgagaccatgaggatagtgggtctgtacatttggggaccccaggtccatccagtgggggcctggcctcccagagtggggacaactccagtgaccaaggagacgggctggacaccagcgtggcctctcccagttctggtggagaagatgaggacttggaccaggagcgacggcgaaacaagaagagggggatcttccccaaggtggccaccaacatcatgcgagcctggttgttccagcacctctcgcacccgtacccctcggaggancanaanaaacagctggcgcaggacacggggctcaccatcctgcaagtcaacaactggttcattaacgcccggagacgcatcgtgcaacctatgatcgatcaatccaaccgcacanggcaaggtgcanccttnancccaaaaggncagcccatcgggggctataccganacncaaccacacgtggccgtccggcctccggnatcatggggaatnanttnaanttggaangaaaanggnattntntaaaaaagnntgangncaggaaaaacccancctccgggtgtgaaccccancctnaaacctggctngggttcccgcctgggncctccactttcaggancccncctcnaaggnccctttgtnaangccaacctccnaaggccntgntggnaaagggggcc

SEQ ID NO: 249 - DNA, 1150 bp, Homo Sapiens
  misc_feature (4)..(4): n is a, c, g, or t
  misc_feature (9)..(9): n is a, c, g, or t
  misc_feature (25)..(26): n is a, c, g, or t
  misc_feature (33)..(34): n is a, c, g, or t
  misc_feature (36)..(36): n is a, c, g, or t
  misc_feature (65)..(66): n is a, c, g, or t
  misc_feature (802)..(802): n is a, c, g, or t
  misc_feature (862)..(862): n is a, c, g, or t
  misc_feature (872)..(872): n is a, c, g, or t
  misc_feature (969)..(969): n is a, c, g, or t
  misc_feature (1029)..(1029): n is a, c, g, or t
  misc_feature (1034)..(1034): n is a, c, g, or t
  misc_feature (1046)..(1046): n is a, c, g, or t
  misc_feature (1065)..(1065): n is a, c, g, or t
  misc_feature (1075)..(1075): n is a, c, g, or t
  misc_feature (1078)..(1078): n is a, c, g, or t
  misc_feature (1086)..(1086): n is a, c, g, or t
  misc_feature (1089)..(1089): n is a, c, g, or t
  misc_feature (1092)..(1092): n is a, c, g, or t
  misc_feature (1095)..(1095): n is a, c, g, or t
  misc_feature (1097)..(1098): n is a, c, g, or t
  misc_feature (1103)..(1103): n is a, c, g, or t
  misc_feature (1117)..(1117): n is a, c, g, or t
  misc_feature (1119)..(1119): n is a, c, g, or t
  misc_feature (1128)..(1128): n is a, c, g, or t
  misc_feature (1134)..(1134): n is a, c, g, or t
  misc_feature (1140)..(1140): n is a, c, g, or t
  misc_feature (1149)..(1149): n is a, c, g, or t
attngaggnaattactatgagaggnncggatcnncntcaccatcacggaatcctatttaggtgannctatagaatcgtcgacccacgcgtccggggcagcagaccgtccaaaccgacacgcgtggtatcctcgcggtgtccggcaagagactaccaagacagacgctatgactgaggctgatgtgaatccaaaggcctatccccttgccgatgcccacctcaccaagaagctactggacctcgttcagcagtcatgtaactataagcagcttcggaaaggagccaatgaggccaccaaaaccctcaacaggggcatctctgagttcatcgtgatggctgcagacgccgagccactggagatcattctgcacctgccgctgctgtgtgaagacaagaatgtgccctacgtgtttgtgcgctccaagcaggccctggggagagcctgtggggtctccaggcctgtcatcgcctgttctgtcaccatcaaagaaggctcgcagctgaaacagcagatccaatccattcagcagtccattgaaaggctcttagtctaaacctgtggcctctgccacgtgctccctgccagcttcccccctgaggttgtgtatcatattatctgtgttagcatgtagtattttcagctactctctattgttataaaatgtagtactaaatctggtttctggatttttgtgttatttttgttctgttttacagggttgctatcccccttcctttcctccctccctctgccatccttcatccttttatcctccctttttggaacaagtgttcagagcanacagaagcagggtggtggcaccgttgaaaggcagaaagagccaagagaaagctgatgganccaggaacanagaatctggttccagctttcagccactagcttcctgttgtgtgcggggtgtggtggaattaaacagcattcattgggtgtccctgtgcctggcaccnaaaaatcattcatacgtgttcaagtgatcaagggggtttcatttgctcttgggggaatangtatnatttggggaagnaaacattgtgtttttggangttttttcgnctnatttccangtntcnttnannaatgnacccctgctggttngnttttggaangggaanttgatnttccccccna

SEQ ID NO: 250 - DNA, 1103 bp, Homo Sapiens
  misc_feature (2)..(2): n is a, c, g, or t
  misc_feature (910)..(910): n is a, c, g, or t
  misc_feature (941)..(941): n is a, c, g, or t
  misc_feature (944)..(944): n is a, c, g, or t
  misc_feature (962)..(962): n is a, c, g, or t
  misc_feature (974)..(974): n is a, c, g, or t
  misc_feature (977)..(977): n is a, c, g, or t
  misc_feature (980)..(980): n is a, c, g, or t
  misc_feature (983)..(983): n is a, c, g, or t
  misc_feature (988)..(988): n is a, c, g, or t
  misc_feature (998)..(998): n is a, c, g, or t
  misc_feature (1024)..(1024): n is a, c, g, or t
  misc_feature (1027)..(1027): n is a, c, g, or t
  misc_feature (1032)..(1032): n is a, c, g, or t
  misc_feature (1038)..(1038): n is a, c, g, or t
  misc_feature (1042)..(1042): n is a, c, g, or t
  misc_feature (1045)..(1045): n is a, c, g, or t
  misc_feature (1052)..(1052): n is a, c, g, or t
  misc_feature (1055)..(1056): n is a, c, g, or t
  misc_feature (1061)..(1061): n is a, c, g, or t
  misc_feature (1078)..(1078): n is a, c, g, or t
  misc_feature (1083)..(1084): n is a, c, g, or t
  misc_feature (1089)..(1089): n is a, c, g, or t
  misc_feature (1098)..(1098): n is a, c, g, or t
  misc_feature (1100)..(1100): n is a, c, g, or t
antagagaaattactatgagaggatcgcatcaccatcaccatcacggatcctatttaggtgacactatagaatcgtcgacccacgcgtccgggcaaggccccagcaggtggcaatggcaacaagaagaagtcgggcaagaaggagaagaagtaacatggaggccaggccaagagccacagggcggcctctccccaaccagcccagcttctccttacctgcacccaggcctcagagtttcagggctaacccccagaatactggtaggggccaaggccatgctccccttgggaaacagaaacaagtgcccagtcagcacctaccccttcccccccagggggttgaatatgcaaaagcagttccgctgggaacccccatccaatcaactgctgtacccatgggggtagtggggttactgtagacaccaagaaccatttgccacaccccgtttagttacagctgaactcctccatcttccaaatcaatcaggcccatccatcccatgcctccctcctccccaccccactccaacagttcctctttcccgagtaaggtggttggggtgttgaagtaccaagtaacctacaagcctcctagttctgaaaagttggaagggcatcatgacctcttggcctctcctttgattctcaatcttcccccaaagcatggtttggtgccagccccttcacctccttccagagcccaagatcaatgctcaagttttggaggacatgatcaccatccccatggtactgatgcttgctggatttagggagggcattttgctaccaagcctcttcccaacgccctggggaccagtcttctgttttgtttttcattgtttgacgtttccactgcatgccttgacttcccccacctcctcctcaaacaagaaactccactgcatgttcnagacagtatggggtggtaaaataaggaaggnaantgtgtggatgtggatggngggggcatgganaanctnganacatnaagttatcanggccttggaggaggctttgtatgtcntcngggantgaaanatcntcnaattccnccnnaaacnaataactaggtggaccnttccnntaaanaaaagggtnanccc

SEQ ID NO: 251 - DNA, 1336 bp, Homo Sapiens
  misc_feature (837)..(837): n is a, c, g, or t
  misc_feature (845)..(845): n is a, c, g, or t
  misc_feature (901)..(901): n is a, c, g, or t
  misc_feature (905)..(905): n is a, c, g, or t
  misc_feature (931)..(931): n is a, c, g, or t
  misc_feature (950)..(950): n is a, c, g, or t
  misc_feature (957)..(957): n is a, c, g, or t
  misc_feature (960)..(960): n is a, c, g, or t
  misc_feature (965)..(965): n is a, c, g, or t
  misc_feature (969)..(970): n is a, c, g, or t
  misc_feature (979)..(979): n is a, c, g, or t
  misc_feature (984)..(984): n is a, c, g, or t
  misc_feature (988)..(988): n is a, c, g, or t
  misc_feature (992)..(992): n is a, c, g, or t
  misc_feature (1003)..(1003): n is a, c, g, or t
  misc_feature (1014)..(1014): n is a, c, g, or t
  misc_feature (1031)..(1031): n is a, c, g, or t
  misc_feature (1034)..(1034): n is a, c, g, or t
  misc_feature (1040)..(1040): n is a, c, g, or t
  misc_feature (1044)..(1044): n is a, c, g, or t
  misc_feature (1054)..(1055): n is a, c, g, or t
  misc_feature (1064)..(1064): n is a, c, g, or t
  misc_feature (1066)..(1066): n is a, c, g, or t
  misc_feature (1075)..(1075): n is a, c, g, or t
  misc_feature (1077)..(1077): n is a, c, g, or t
  misc_feature (1084)..(1084): n is a, c, g, or t
  misc_feature (1102)..(1102): n is a, c, g, or t
  misc_feature (1111)..(1111): n is a, c, g, or t
  misc_feature (1121)..(1121): n is a, c, g, or t
  misc_feature (1132)..(1132): n is a, c, g, or t
  misc_feature (1135)..(1135): n is a, c, g, or t
  misc_feature (1145)..(1145): n is a, c, g, or t
  misc_feature (1149)..(1149): n is a, c, g, or t
  misc_feature (1158)..(1158): n is a, c, g, or t
  misc_feature (1160)..(1160): n is a, c, g, or t
  misc_feature (1164)..(1164): n is a, c, g, or t
  misc_feature (1168)..(1168): n is a, c, g, or t
  misc_feature (1177)..(1177): n is a, c, g, or t
  misc_feature (1180)..(1180): n is a, c, g, or t
  misc_feature (1184)..(1184): n is a, c, g, or t
  misc_feature (1208)..(1208): n is a, c, g, or t
  misc_feature (1214)..(1214): n is a, c, g, or t
  misc_feature (1228)..(1228): n is a, c, g, or t
  misc_feature (1241)..(1241): n is a, c, g, or t
  misc_feature (1248)..(1248): n is a, c, g, or t
  misc_feature (1254)..(1254): n is a, c, g, or t
  misc_feature (1256)..(1256): n is a, c, g, or t
  misc_feature (1259)..(1259): n is a, c, g, or t
  misc_feature (1266)..(1266): n is a, c, g, or t
  misc_feature (1272)..(1272): n is a, c, g, or t
  misc_feature (1276)..(1276): n is a, c, g, or t
  misc_feature (1282)..(1285): n is a, c, g, or t
  misc_feature (1300)..(1300): n is a, c, g, or t
  misc_feature (1306)..(1306): n is a, c, g, or t
  misc_feature (1324)..(1325): n is a, c, g, or t
agagagattactatgagaggatcgcatcaccatcaccatcacggatcctatttaggtgacactatagaatcgtcgacccacgcgtccgagcgccgggaaggggtttgcagctgctccgtcatcgtgcggcccgacgctatctcgcgctcgtgtgcaggcccggctcggctcctggtccccggtgcgagggttaacgcgaggccccggcctcggtccccggactaggccgtgaccccgggtgccatgaagcaggagggctcggcgcggcgccgcggcgcggacaaggcgaaaccgccgcccggcggaggagaacaagaacccccaccgccgccggccccccaggatgtggagatgaaagaggaggcagcgacgggtggcgggtcgacgggggaggcagacggcaagacggcggcggcagcggctgagcactcccagcgagagctggacacagtcaccttggaggacatcaaggagcacgtgaaacagctagagaaagcggtttcaggcaaggagccgagattcgtgctgcgggccctgcggatgctgccttccacatcacgccgcctcaaccactatgttctgtataaggctgtgcagggcttcttcacttcaaataatgccactcgagactttttgctccccttcctggaagagcccatggacacagaggctgatttacagttccgtccccgcacgggaaaagctgcgtcgacacccctcctgcctgaagtggaagcctatctccaactcctcgtggtcatcttcatgatgaacagcaagcgctacaaagaggcacagaagatctctgatgatctgatgcagaaaatcagtactcanaaccgccngggccctaaaccttgtagccgcaaagtgttactattatcacgcccgggtctatgantttntggaaaaagctggatgtggtgcgcancttttttgcatgcttcggntccgganaanttacncttnnggcatgacncaaangggnaagnccaccctgttnaaacctcctgnttgcggaattacttaantanagcttntacnaacaaggctnnaaaaactgntnttcaaattntnttttccnaaacaagccaaaaaaatnaattggccnaggtactttnttaacaggggnaancaaaaccttncacnttgaaatantnaaancccngaaaaaaanaanaaancctttttaaggccctaaaaaaaanttttgnttttaaaaaaggcntccgggatggttnttttagncccctnanccnaaaaggnttttcntccnggaaannnntattttttcccaaancccttntttcccaggttttttttnnaattaaaaatt

SEQ ID NO: 252 - DNA, 1179 bp, Homo Sapiens
  misc_feature (902)..(902): n is a, c, g, or t
  misc_feature (958)..(958): n is a, c, g, or t
  misc_feature (967)..(967): n is a, c, g, or t
  misc_feature (1001)..(1001): n is a, c, g, or t
  misc_feature (1043)..(1043): n is a, c, g, or t
  misc_feature (1048)..(1048): n is a, c, g, or t
  misc_feature (1057)..(1057): n is a, c, g, or t
  misc_feature (1060)..(1060): n is a, c, g, or t
  misc_feature (1069)..(1069): n is a, c, g, or t
  misc_feature (1080)..(1080): n is a, c, g, or t
  misc_feature (1095)..(1095): n is a, c, g, or t
  misc_feature (1098)..(1098): n is a, c, g, or t
  misc_feature (1102)..(1102): n is a, c, g, or t
  misc_feature (1118)..(1118): n is a, c, g, or t
  misc_feature (1126)..(1126): n is a, c, g, or t
  misc_feature (1128)..(1128): n is a, c, g, or t
  misc_feature (1135)..(1135): n is a, c, g, or t
  misc_feature (1141)..(1141): n is a, c, g, or t
  misc_feature (1143)..(1143): n is a, c, g, or t
  misc_feature (1157)..(1157): n is a, c, g, or t
  misc_feature (1162)..(1162): n is a, c, g, or t
  misc_feature (1177)..(1178): n is a, c, g, or t
tagagaaattactatgagaggatcgcatcaccatcaccatcacggatcctatttaggtgacactatagaatcgtcgacccacgcgtccgcacagcgcctcatcactcagttccactttaccagctggccagactttggggtgccttttaccccgatcggcatgctcaagttcctcaagaaggtgaaggcctgtaaccctcagtatgcaggggccatcgtggtccactgcagtgcaggtgtagggcgtacaggtacctttgtcgtcattgatgccatgctggacatgatgcatacagaacggaaggtggacgtgtatggctttgtgagccggatccgggcacagcgctgccagatggtgcaaaccgatatgcagtatgtcttcatataccaagcccttctggagcattatctctatggagatacagaactggaagtgacctctctagaaacccacctgcagaaaatttacaacaaaatcccagggaccagcaacaatggattagaggaggagtttaagaagttaacatcaatcaaaatccagaatgacaagatgcggactggaaaccttccagccaacatgaagaagaaccgtgttttacagatcattccatatgaattcaacagagtgatcattccagttaagcggggcgaagagaatacagactatgtgaacgcatcctttattgatggctaccggcagaaggactcctatatcgccagccagggccctcttctccacacaattgaggacttctggcgaatgatctgggagtggaaatcctgctctatcgtgatgctaacagaactggaggagagaggccaggagaagtgtgcccagtactggccatctgatggactggtgtcctatggagatattacagtggaactgaagaaggaggagnaatgtgagagctacaccgtccgagacctcctggtcaccaacaccagggagaataanagccggcanatccggcagttccacttccatggctggcctgaantgggcatccccagtgacggaaagggcatgatcagcatcatcnccccngtgcaaaancancaccaccantcagggaaccnccccatcccgtgcantgnaacnccggggcaagaaaganggggaccntnttggccntgaacncntcctggaacggggnaaacnaaagggaatttggannt

SEQ ID NO: 253 - DNA, 1232 bp, Homo Sapiens
  misc_feature (2)..(2): n is a, c, g, or t
  misc_feature (4)..(4): n is a, c, g, or t
  misc_feature (902)..(902): n is a, c, g, or t
  misc_feature (966)..(966): n is a, c, g, or t
  misc_feature (969)..(971): n is a, c, g, or t
  misc_feature (993)..(993): n is a, c, g, or t
  misc_feature (1020)..(1020): n is a, c, g, or t
  misc_feature (1025)..(1026): n is a, c, g, or t
  misc_feature (1048)..(1048): n is a, c, g, or t
  misc_feature (1053)..(1053): n is a, c, g, or t
  misc_feature (1062)..(1062): n is a, c, g, or t
  misc_feature (1073)..(1073): n is a, c, g, or t
  misc_feature (1076)..(1076): n is a, c, g, or t
  misc_feature (1081)..(1081): n is a, c, g, or t
  misc_feature (1097)..(1097): n is a, c, g, or t
  misc_feature (1116)..(1116): n is a, c, g, or t
  misc_feature (1140)..(1140): n is a, c, g, or t
  misc_feature (1142)..(1142): n is a, c, g, or t
  misc_feature (1144)..(1144): n is a, c, g, or t
  misc_feature (1146)..(1146): n is a, c, g, or t
  misc_feature (1149)..(1149): n is a, c, g, or t
  misc_feature (1152)..(1154): n is a, c, g, or t
  misc_feature (1165)..(1165): n is a, c, g, or t
  misc_feature (1169)..(1169): n is a, c, g, or t
  misc_feature (1173)..(1173): n is a, c, g, or t
  misc_feature (1186)..(1186): n is a, c, g, or t
  misc_feature (1190)..(1190): n is a, c, g, or t
  misc_feature (1201)..(1201): n is a, c, g, or t
  misc_feature (1205)..(1205): n is a, c, g, or t
  misc_feature (1207)..(1207): n is a, c, g, or t
  misc_feature (1224)..(1224): n is a, c, g, or t
  misc_feature (1227)..(1227): n is a, c, g, or t
  misc_feature (1232)..(1232): n is a, c, g, or t
cnantagagagattactatgagaggatcgcatcaccatcaccatcacggatcctatttaggtgacactatagaatcgtcgacccacgcgtccgcccagagcaattgttacatctggatggaaaagcgacaccggggtccaggattggcctccggacagctgtactcctaccctgcccggcgctggcggaaaaagcggcgagcccatccccctgaggatccacgactttccttcccatctattaagccagacacagaccagaccctgaagaaggaggggctgatctctcaggatggcagtagtttagaggctctgttgcgcactgaccccctggagaagcgaggtgccccggatccccgagttgatgatgacagcctgggcgagtttcctgtgaccaacagtcgagcgcgaaagcggatcctagaaccagatgacttcctggatgacctcgatgatgaagactatgaagaagatactcccaagcgtcggggaaaggggaaatccaagggtaagggtgtgggcagtgcccgtaagaagctggatgcttccatcctggaggaccgggataagccctatgcctgtgacatttgtggaaaacgttacaagaaccgaccaggcctcagttaccactatgcccactcccacttggctgaggaggagggcgaggacaaggaagactctcaaccacccactcctgtttcccagaggtctgaggagcagaaatccaaaaagggtcctgatggattggccttgcccaacaactactgtgacttctgcctgggggactcaaagattaacaagaagacgggacaacccgaggagctggtgtcctgttctgactgtggccgctcagggcatccatcttgcctccaatttacccccgtgatgatggcggcagtgaanacataccgctggcagtgcatcgagtgcaaatgttgcaatatctgcggcacctccgaaaatgacnacnnnttgctcttctgtgatgactgcnatcgtggctaccacatgtactgtctcnccccnntccatgtctgaccccctgaagnaattngaactgccncctgtgtttgnacntgttnaaaaaaaaacttcctntaccaaaaccaaactcctnttgaatgggccccccctgctcccnanantntanggnnnttttccccccnttanattnaaaccattttccntttnccccccccttnaaancnaaaaacttgggggtttnccncttcn

SEQ ID NO: 254 - DNA, 1133 bp, Homo Sapiens
  misc_feature (2)..(2): n is a, c, g, or t
  misc_feature (957)..(957): n is a, c, g, or t
  misc_feature (988)..(988): n is a, c, g, or t
  misc_feature (1000)..(1000): n is a, c, g, or t
  misc_feature (1002)..(1002): n is a, c, g, or t
  misc_feature (1008)..(1008): n is a, c, g, or t
  misc_feature (1021)..(1021): n is a, c, g, or t
  misc_feature (1025)..(1026): n is a, c, g, or t
  misc_feature (1033)..(1033): n is a, c, g, or t
  misc_feature (1043)..(1043): n is a, c, g, or t
  misc_feature (1059)..(1059): n is a, c, g, or t
  misc_feature (1070)..(1070): n is a, c, g, or t
  misc_feature (1077)..(1077): n is a, c, g, or t
  misc_feature (1079)..(1080): n is a, c, g, or t
  misc_feature (1084)..(1084): n is a, c, g, or t
  misc_feature (1094)..(1095): n is a, c, g, or t
  misc_feature (1099)..(1099): n is a, c, g, or t
  misc_feature (1103)..(1104): n is a, c, g, or t
  misc_feature (1108)..(1108): n is a, c, g, or t
  misc_feature (1113)..(1113): n is a, c, g, or t
  misc_feature (1115)..(1115): n is a, c, g, or t
  misc_feature (1125)..(1125): n is a, c, g, or t
  misc_feature (1130)..(1131): n is a, c, g, or t
antagagaaattactatgagaggatcgcatcaccatcaccatcacggatcctatttaggtgacactatagaatcgtcgacccacgcgtccgggtcaggtcgcggctggtcactgtgcaggcgcttgggtgacgcgacgatctcagcggatctggtcaccttcgtctccccgccatggagacctcagcactcaagcagcaggagcagcccgcggcgaccaagatcaggaacctgccctgggttgaaaaataccggccacagaccctgaatgatctcatttctcatcaggacattctgagtaccattcagaagtttatcaatgaagaccgactgccacacttgcttctctacggtcccccagggacaggcaagacatctaccatcctagcctgtgcgaaacagctatataaagacaaagaatttggctccatggtcttggagctgaatgcttcagatgaccgaggaatagacatcattcgaggaccgatcctgagctttgctagcacaaggacaatatttaagaaaggctttaagctagtgatcttggatgaagcagacgccatgactcaggacgcccagaatgccttgagaagagtcccgctgcacgaggtttcggttcggtcccctgactcctgaactcatggttccccgcctggaacatgtcgtggaagaagagaaagttgatataagtgaagatggaatgaaagcactagtcactctttccagtggagacatgcgtagggctctgaacattttgcagagcaccaatatggcctttgggaaggtgacagaggagactgtctacacctgcaccgggcacccgctcaagtcagacattgccaacatcctggactggatgttgaatcaagatttcaccaccagcctacagaaatattacagagttgaaaactctgaaggggttggcactgcatgatatccctgacagaaatacacttgntttgtgcaaaaaattgactttccatctttcnatttccaaatanantttatngaccaaaatggcnaaannttgaatnacaggctttnctgttgggccccaacnaaaaaaatccngctgaancnncccncattgctgcnntttnaagnncccnaaaancntgattttttncaaanncc

SEQ ID NO: 255 - DNA, 588 bp, Homo Sapiens
  misc_feature (1)..(1): n is a, c, g, or t
nattagagaaattactatgagaggatcgcatcaccatcaccatcacggatcctatttaggtgacactatagaatcgtcgacccacgcgtccgcccacgcgtccgggaggtggcagccatctccttctcggcatcatggccgccctcagaccccttgtgaagcccaagatcgtcaaaaagagaaccaagaagttcatccggcaccagtcagaccgatatgtcaaaattaagcgtaactggcggaaacccagaggcattgacaacagggttcgtagaagattcaagggccagatcttgatgcccaacattggttatggaagcaacaaaaaaacaaagcacatgctgcccagtggcttccggaagttcctggtccacaacgtcaaggagctggaagtgctgctgatgtgcaacaaatcttactgtgccgagatcgctcacaatgtttcctccaagaaccgcaaagccatcgtggaaagagctgcccaactggccatcagagtcaccaaccccaatgccaggctgcgcagtgaagaaaatgagtaggcagctcatgtgcacgttttctgtttaaataaatgtaaaaactgcc

SEQ ID NO: 256 - DNA, 1115 bp, Homo Sapiens
  misc_feature (950)..(950): n is a, c, g, or t
  misc_feature (997)..(997): n is a, c, g, or t
  misc_feature (1018)..(1018): n is a, c, g, or t
  misc_feature (1037)..(1037): n is a, c, g, or t
  misc_feature (1041)..(1041): n is a, c, g, or t
  misc_feature (1043)..(1043): n is a, c, g, or t
  misc_feature (1078)..(1079): n is a, c, g, or t
  misc_feature (1085)..(1085): n is a, c, g, or t
  misc_feature (1088)..(1088): n is a, c, g, or t
  misc_feature (1090)..(1090): n is a, c, g, or t
  misc_feature (1097)..(1097): n is a, c, g, or t
  misc_feature (1099)..(1099): n is a, c, g, or t
  misc_feature (1102)..(1102): n is a, c, g, or t
  misc_feature (1112)..(1112): n is a, c, g, or t
  misc_feature (1114)..(1115): n is a, c, g, or t
agagaattactatgagaggatcgcatcaccatcaccatcacggatcctatttaggtgacactatagaatcgtcgacccacgcgtccgaggagatccagcaccacctgaagaaactggagggccgccgcctggactttgactacaagaagaagcggcagggcaagatccccgatgaggagctacgccaggcgctggagaagttcgaggagtccaaggaggtggcagaaaccagcatgcacaacctcctggagactgacatcgagcaggtgagtcagctctcggccctggtggatgcacagctggactaccaccggcaggccgtgcagatcctggacgagctggcggagaagctcaagcgcaggatgcgggaagcttcctcacgccctaagcgggagtataagcccaagccccgggagccctttgaccttggagagcctgagcagtccaacgggggcttcccctgcaccacagcccccaagatcgcagcttcatcgtctttccgatcttccgacaagcccatccggacccctagccggagcatgccgcccctggaccagccgagctgcaaggcgctgtacgacttcgagcccgagaacgacggggagctgggcttccatgagggcgacgtcatcacgctgaccaaccagatcgatgagaactggtacgagggcatgctggacagccagtcgggcttcttcccgctcagctacgtggaggtgcttgtgcccctgccgcagtgactcacccgtgtccccgccccgcccctccgtccacactggccggcaccccctgctgggtctcctgcattccacggagcccctgctgccagggcggtgtctgagcctgccggcgccacctgggccccggcccttgaggtactccctgagcaggacccacacttggggtgggggggcttatctggggtgggtggggatgcctgtttacactancgctgactccaacggtgacggctcctttccccattcatggggcagcntcttccccgttcccaattttngccagttgggcgagggggnaaanantaaggtgctcttaaaaaactaatgttctttggggnncccccnctncntttgaancnaangggggccggncnn

SEQ ID NO: 257 - DNA, 1179 bp, Homo Sapiens
  misc_feature (763)..(763): n is a, c, g, or t
  misc_feature (837)..(837): n is a, c, g, or t
  misc_feature (847)..(847): n is a, c, g, or t
  misc_feature (887)..(887): n is a, c, g, or t
  misc_feature (907)..(907): n is a, c, g, or t
  misc_feature (936)..(936): n is a, c, g, or t
  misc_feature (954)..(954): n is a, c, g, or t
  misc_feature (958)..(958): n is a, c, g, or t
  misc_feature (971)..(971): n is a, c, g, or t
  misc_feature (975)..(975): n is a, c, g, or t
  misc_feature (987)..(987): n is a, c, g, or t
  misc_feature (997)..(997): n is a, c, g, or t
  misc_feature (1002)..(1002): n is a, c, g, or t
  misc_feature (1010)..(1010): n is a, c, g, or t
  misc_feature (1035)..(1035): n is a, c, g, or t
  misc_feature (1041)..(1041): n is a, c, g, or t
  misc_feature (1048)..(1050): n is a, c, g, or t
  misc_feature (1076)..(1076): n is a, c, g, or t
  misc_feature (1095)..(1095): n is a, c, g, or t
  misc_feature (1109)..(1109): n is a, c, g, or t
  misc_feature (1111)..(1111): n is a, c, g, or t
  misc_feature (1118)..(1118): n is a, c, g, or t
  misc_feature (1121)..(1121): n is a, c, g, or t
  misc_feature (1125)..(1125): n is a, c, g, or t
  misc_feature (1138)..(1138): n is a, c, g, or t
  misc_feature (1140)..(1140): n is a, c, g, or t
  misc_feature (1142)..(1142): n is a, c, g, or t
  misc_feature (1152)..(1152): n is a, c, g, or t
  misc_feature (1157)..(1158): n is a, c, g, or t
  misc_feature (1167)..(1168): n is a, c, g, or t
agaaattactatgagaggatcgcatcaccatcaccatcacggatcctatttaggtgacactatagaatcgtcgacccacgcgtccgcccacgcgtccgtgctggcggacatggacgtggtgaatcagctggtggctgggggtcagttccgggtggtcaaggagcccctcggctttgtgaaggtgctgcaatgggtcttcgccatcttcgcctttgccacatgcggcagctacagtggggagctccagctgagcgtggattgtgccaacaagaccgagagtgacctcagcatcgaggtcgagttcgagtaccccttcaggctgcaccaagtgtactttgatgcacccacctgccgagggggcaccaccaaggtcttcttagttggggactactcctcgtcagccgaattctttgtcaccgtggccgtgtttgccttcctctactccatgggggctctggccacctacatcttcctgcagaacaagtaccgagagaataacaaagggcccatgctggactttctggccacggctgtgttcgccttcatgtggctagttagctcatcggcatgggccaaggggctgtcagatgtgaagatggccacagacccagagaacattatcaaggagatgcctgtctgccgccagacagggaacacatgcaaggagctgagagaccctgtgacctcgggactcaacacctcggtggtgttcggcttcctgaacctggtgctctgggtcggcaacctgtggttcgtgtttaangagacaggctgggccgccccgttcctgcgcgcgcctccccggcgcccccgagaaacaaccggcacccggggaangcctacggcnatgcaggctacgggcagggccccggcggggtacgggcccnagaattcctacgggcctcanggcggctaccagcctgaatatggtcaacnacccggcaacggtggcantggnctacgggcctcanggcnactaatgggcancaaggctacngcccncaaggggncacccacctccttctccaatcaaangtaatntggtcannnaaacccaaaaaaaacttggggggggnaaaaaacttcaaaaaaagnctgccccctttccnanccctaanccnaagntcccccccccaancnanaaaacccggncttgnngttaaaaannaaaaatttaaa

SEQ ID NO: 258 - DNA, 1110 bp, Homo Sapiens
  misc_feature (1)..(1): n is a, c, g, or t
  misc_feature (986)..(986): n is a, c, g, or t
  misc_feature (1006)..(1006): n is a, c, g, or t
  misc_feature (1009)..(1009): n is a, c, g, or t
  misc_feature (1031)..(1031): n is a, c, g, or t
  misc_feature (1039)..(1039): n is a, c, g, or t
  misc_feature (1043)..(1043): n is a, c, g, or t
  misc_feature (1045)..(1045): n is a, c, g, or t
  misc_feature (1057)..(1057): n is a, c, g, or t
  misc_feature (1061)..(1062): n is a, c, g, or t
  misc_feature (1072)..(1072): n is a, c, g, or t
  misc_feature (1074)..(1074): n is a, c, g, or t
  misc_feature (1077)..(1077): n is a, c, g, or t
  misc_feature (1080)..(1080): n is a, c, g, or t
  misc_feature (1083)..(1084): n is a, c, g, or t
  misc_feature (1086)..(1086): n is a, c, g, or t
  misc_feature (1090)..(1090): n is a, c, g, or t
  misc_feature (1092)..(1093): n is a, c, g, or t
  misc_feature (1095)..(1095): n is a, c, g, or t
  misc_feature (1106)..(1107): n is a, c, g, or t
naaatagagaaattactatgagaggatcgcatcaccatcaccatcacggatcctatttaggtgacactatagaatcgtcgacccacgcgtccgtactttttgcgatgcctactggagactttgattcgaagcccagttgggccgaccaggtggaggaggagggggaggacgacaaatgtgtcaccagcgagctcctcaaggggatccctctggccacaggtgacaccagcccagagccagagctactgccgggagctccactgccgcctcccaaggaggtcatcaacggaaacataaagacagtgacagagtacaagatagatgaggatggcaagaagttcaagattgtccgcaccttcaggattgagacccggaaggcttcaaaggctgtcgcaaggaggaagaactggaagaagttcgggaactcagagtttgacccccccggacccaatgtggccaccaccactgtcagtgacgatgtctctatgacgttcatcaccagcaaagaggacctgaactgccaggaggaggaggaccctatgaacaaactcaagggccagaagatcgtgtcctgccgcatctgcaagggcgaccactggaccacccgctgcccctacaaggatacgctggggcccatgcagaaggagctggccgagcagctgggcctgtctactggcgagaaggagaagctgccgggagagctagagccggtgcaggccacgcagaacaagacagggaagtatgtgccgccgagcctgcgcgacggggccagccgccgcggggagtccatgcagcccaaccgcagagccgacgacaacgccaccatccgtgtcaccaacttgtcagaggacacgcgtgagaccgacctgcaggagctcttccggcctttcggctccatctcccgcatctacctggctaaggacaagaccactggccaatccaagggctttgccttcatcagcttccaccgccgcgaggatgctgcnctgcattttcccgggggtgnccnggttttggttacaaccacttcntcctcaangtcnanggggccaagccntccnncaattaaccngntgnccntgnntnttcngnncnggacccttggnnaaa

SEQ ID NO: 259 - DNA, 737 bp, Homo Sapiens
  misc_feature (687)..(687): n is a, c, g, or t
  misc_feature (699)..(699): n is a, c, g, or t
  misc_feature (704)..(705): n is a, c, g, or t
  misc_feature (710)..(710): n is a, c, g, or t
  misc_feature (715)..(715): n is a, c, g, or t
  misc_feature (718)..(718): n is a, c, g, or t
  misc_feature (720)..(720): n is a, c, g, or t
  misc_feature (726)..(727): n is a, c, g, or t
  misc_feature (737)..(737): n is a, c, g, or t
ttagagaaattactatgagaggatcgcatcaccatcaccatcacggatcctatttaggtgacactatagaatcgtcgacccacgcgtccggccagccgccagccttcttcagcaagctgaccgagagcaactccgccatggtcaagtccaagaagcaagagatcaacaagaagctgaacacccacaaccggaatgagcctgaatacaatatcagccagcctgggacggagatcttcaatatgcccgccatcaccggaacaggccttatgacctatagaagccaggcggtgcaggaacatgccagcaccaacatggggctggaggccataattagaaaggcactcatgggtggcggcgggaaggccaaggtctctggcagacccagcagccgaaaagccaagtccccggccccgggcctggcatctggggaccggccaccctctgtctcctcagtgcactcggagggagactgcaaccgccggacgccgctcaccaaccgcgtgtgggaggacaggccctcgtccgcaggttccacgccattcccctacaaccccctgatcatgcggctgcaggcgggtgtcatggcttccccacccccaccgggcctccccgcgggcagcgggcccctcgctggcccccaccacgcctgggacgaggagcccaagccactgctctgctcgcattacnagacactctccnacagnnagtgnctcanaananggcggnngggggggggn

SEQ ID NO: 260 - DNA, 988 bp, Homo Sapiens
  misc_feature (5)..(5): n is a, c, g, or t
  misc_feature (49)..(49): n is a, c, g, or t
  misc_feature (56)..(56): n is a, c, g, or t
  misc_feature (59)..(59): n is a, c, g, or t
  misc_feature (674)..(674): n is a, c, g, or t
  misc_feature (739)..(739): n is a, c, g, or t
  misc_feature (750)..(750): n is a, c, g, or t
  misc_feature (752)..(752): n is a, c, g, or t
  misc_feature (779)..(779): n is a, c, g, or t
  misc_feature (793)..(793): n is a, c, g, or t
  misc_feature (815)..(815): n is a, c, g, or t
  misc_feature (820)..(820): n is a, c, g, or t
  misc_feature (825)..(825): n is a, c, g, or t
  misc_feature (841)..(841): n is a, c, g, or t
  misc_feature (846)..(846): n is a, c, g, or t
  misc_feature (848)..(848): n is a, c, g, or t
  misc_feature (879)..(879): n is a, c, g, or t
  misc_feature (883)..(883): n is a, c, g, or t
  misc_feature (895)..(895): n is a, c, g, or t
  misc_feature (907)..(907): n is a, c, g, or t
  misc_feature (912)..(912): n is a, c, g, or t
  misc_feature (914)..(914): n is a, c, g, or t
  misc_feature (917)..(917): n is a, c, g, or t
  misc_feature (921)..(921): n is a, c, g, or t
  misc_feature (927)..(927): n is a, c, g, or t
  misc_feature (943)..(943): n is a, c, g, or t
  misc_feature (946)..(946): n is a, c, g, or t
  misc_feature (950)..(951): n is a, c, g, or t
  misc_feature (962)..(963): n is a, c, g, or t
  misc_feature (970)..(970): n is a, c, g, or t
  misc_feature (974)..(974): n is a, c, g, or t
  misc_feature (981)..(982): n is a, c, g, or t
  misc_feature (986)..(986): n is a, c, g, or t
atagngagattactatgagaggatcgcatcaccatcaccatcacggatnctatttnggngacactataaaatcgtcgacccacgcggtccggcgcaagacaaaatccaggacttgcctatggaaacccatattctggtatccaagaaagttcttcccccagcccgctctccatcaagaaatgccctatctgcaaagcagatgatatttgtgatcacaccttggagcaacagcagatgcagcccctttgtttcaattgtccaatttgtgacaagatcttcccagctacagagaagcagatctttgaagaccacgtgttctgccactctctctgagtatcccaacctcttggatgtatacagagattttatagaatagaacctatagcttctaccatgagttatatgagtcaagatcctgcctaacctgaaattattagggatttactcagccctgctgccgctaacagtggagttatgtcactgatctgaaggtcactgttaagggcttctgctgccatccttgtgggttgctacctttaagtcgcataactctagctgtatcatcctctcacctgtcattcttctgagggtctcagtacaagggccctgggatggagccaacctgggtattcacaacaggcctgacttgatactaagtgattagttttccaagntgtcccactggcattcaaagtcagcccttgagtgtatttgttctcagtcctaaccctggggccanagattggtccnangttgaaaattccttccccctcaatccntggcgttgctttcnccaaaggattggttttaaaacnagccnaaaantgcccgtgggaaaaancctcnanaatccaatttggaaacccaaaggtttcccanggtnaattttctccanccccaaaagaancatcntnacncctngaaccnaaaaacaggaaagttntgntttnngtcccaaaaanncttttcngggnaacctcnnggtnaa

SEQ ID NO: 261 - DNA, 1200 bp, Homo Sapiens
  misc_feature (728)..(728): n is a, c, g, or t
  misc_feature (863)..(863): n is a, c, g, or t
  misc_feature (897)..(897): n is a, c, g, or t
  misc_feature (903)..(903): n is a, c, g, or t
  misc_feature (970)..(970): n is a, c, g, or t
  misc_feature (973)..(973): n is a, c, g, or t
  misc_feature (997)..(997): n is a, c, g, or t
  misc_feature (1005)..(1005): n is a, c, g, or t
  misc_feature (1013)..(1013): n is a, c, g, or t
  misc_feature (1015)..(1015): n is a, c, g, or t
  misc_feature (1040)..(1040): n is a, c, g, or t
  misc_feature (1051)..(1051): n is a, c, g, or t
  misc_feature (1059)..(1059): n is a, c, g, or t
  misc_feature (1063)..(1063): n is a, c, g, or t
  misc_feature (1066)..(1066): n is a, c, g, or t
  misc_feature (1098)..(1098): n is a, c, g, or t
  misc_feature (1105)..(1105): n is a, c, g, or t
  misc_feature (1109)..(1109): n is a, c, g, or t
  misc_feature (1121)..(1121): n is a, c, g, or t
  misc_feature (1123)..(1124): n is a, c, g, or t
  misc_feature (1130)..(1130): n is a, c, g, or t
  misc_feature (1133)..(1133): n is a, c, g, or t
  misc_feature (1135)..(1136): n is a, c, g, or t
  misc_feature (1154)..(1154): n is a, c, g, or t
  misc_feature (1160)..(1160): n is a, c, g, or t
  misc_feature (1166)..(1166): n is a, c, g, or t
  misc_feature (1170)..(1170): n is a, c, g, or t
  misc_feature (1172)..(1172): n is a, c, g, or t
  misc_feature (1176)..(1177): n is a, c, g, or t
  misc_feature (1189)..(1189): n is a, c, g, or t
  misc_feature (1193)..(1194): n is a, c, g, or t
  misc_feature (1198)..(1198): n is a, c, g, or t
atagagaaattactatgagaggatcgcatcaccatcaccatcacggatcctatttaggtgacactatagaatcgtcgacccacgcgtccgagctgcgcgagggtcgacagcctccgccacatcctccacctctcttggtccagcgagcgttgccgggccagggtcaagcggagggctccgacggcgcggacggagcgaagcgccgagccatggcgcaccaaacgggcatccacgccacggaagagctgaaggaattctttgccaaggcacgggctggctctgtgcggctcatcaaggttgtgattgaggacgagcagctcgtgctgggtgcctcgcaggagccagtaggccgctgggatcaggactatgacagggccgtgctgccactgctggacgcccagcagccctgctacctgctctaccgcctcgactcacagaatgctcagggcttcgaatggctcttcctcgcctggtcgcctgataactcccccgtgcggctgaagatgctgtacgcggccacgcgggccacagtgaaaaaggagtttggaggtggccacatcaaggatgagctcttcgggactgtgaaggatgacctctcttttgctgggtaccagaaacacctgtcgtcctgtgcggcacctgccccgctgacctcggctgagagagagctccagcagatccgcattaacgaggtgaagacagagatcagtgtggaaagcaagcaccanaccctgcagggcctcgccttccccctgcagcctgaggcccagcgggcactccagcagctcaagcagaaaatggtcaactacatccagatgaagctggacctagagcgggaaaccattgagctggtgcacacagancccacggatgtggcccagctgccctcccgggtgncccganatgctgcccgctaccacttcttcctctacaagcacaccatgaaggccaacccccttgaagtctgtantgnttcatctactccatgccggggtanaagtgcancatcaagnancgaatgctctactccactgcaaaanccgcctcctcnaattccgngaanaanaatttcattctggaaattcccaaaaaaatttnaaattgncaanggggcaaaactnanngcaaanttntnnaaaaaagggaacccaaanaaaacncctttnaaangncttnnccaacccaaggncccnngggnaa

SEQ ID NO: 262 - DNA, 1179 bp, Homo Sapiens
  misc_feature (1)..(1): n is a, c, g, or t
  misc_feature (912)..(912): n is a, c, g, or t
  misc_feature (926)..(926): n is a, c, g, or t
  misc_feature (967)..(967): n is a, c, g, or t
  misc_feature (970)..(970): n is a, c, g, or t
  misc_feature (994)..(994): n is a, c, g, or t
  misc_feature (1003)..(1003): n is a, c, g, or t
  misc_feature (1026)..(1026): n is a, c, g, or t
  misc_feature (1030)..(1030): n is a, c, g, or t
  misc_feature (1034)..(1034): n is a, c, g, or t
  misc_feature (1043)..(1043): n is a, c, g, or t
  misc_feature (1045)..(1045): n is a, c, g, or t
  misc_feature (1062)..(1062): n is a, c, g, or t
  misc_feature (1064)..(1064): n is a, c, g, or t
  misc_feature (1071)..(1071): n is a, c, g, or t
  misc_feature (1074)..(1074): n is a, c, g, or t
  misc_feature (1086)..(1086): n is a, c, g, or t
  misc_feature (1090)..(1090): n is a, c, g, or t
  misc_feature (1109)..(1109): n is a, c, g, or t
  misc_feature (1112)..(1112): n is a, c, g, or t
  misc_feature (1119)..(1119): n is a, c, g, or t
  misc_feature (1133)..(1134): n is a, c, g, or t
  misc_feature (1136)..(1136): n is a, c, g, or t
  misc_feature (1138)..(1138): n is a, c, g, or t
  misc_feature (1142)..(1142): n is a, c, g, or t
  misc_feature (1144)..(1144): n is a, c, g, or t
  misc_feature (1147)..(1147): n is a, c, g, or t
  misc_feature (1162)..(1163): n is a, c, g, or t
  misc_feature (1166)..(1166): n is a, c, g, or t
  misc_feature (1175)..(1177): n is a, c, g, or t
naatagagaaattactatgagaggatcgcatcaccatcaccatcacggatcctatttaggtgacactatagaatcgtcgacccacgcgtccgcggaactcctagcggacacctcgtggagtccggccggaagagcaaccgagatgaaggtgaagatgctgagccggaatccggacaattatgtccgcgaaaccaagttggacttacagagagttccaagaaactatgatcctgctttacatccttttgaggtcccacgagaatatataagagctttaaatgctaccaaactggaacgagtatttgcaaaaccattccttgcttcgctggatggtcaccgtgatggagtcaattgcttggcaaagcatccagagaagctggctactgtcctttctggggcgtgtgatggagaggttagaatttggaatctaactcagcggaattgtatccgtacaatacaagcacatgaaggctttgtacgaggaatatgtactcgcttttgtgggacttcttttttcactgttggtgatgacaaaactgtgaagcagtggaaaatggatgggccaggctatggagacgaggaagagccattacatacaatattaggaaagacagtgtatactgggattgatcatcactggaaagaagctgtttttgccacatgtggacagcaagtagacatttgggatgaacaaagaactaatcctatatgttcaatgacctggggatttgacagtataagtagtgttaaatttaacccaattgagacatttctcttgggaagttgtgcatctgacaggaatatagtactgtacgatatgaggcaagctactcctttgaaaaggttatcttagatatgagaacaaatacaatctgttggaaccctatggaagctttcatttttacagcagcnaatgaagattatancttatatacttttgatatgcgtgcactggacactcctgtanggnccatatggatcatgtatctgcagngctggatgngaatactcccccctgggaagganttgngtcngctatttcnanaatctatccaatcttcntnaaacaantcnaaccgggaggtnttcntacaaaaaatgcacatgtntcngggtaanggactccgacccannantntggngnatngaaaaagaaatcccnnggnaactagctnnnaa

SEQ ID NO: 263 - DNA, 858 bp, Homo Sapiens
  misc_feature (835)..(839): n is a, c, g, or t
  misc_feature (846)..(847): n is a, c, g, or t
  misc_feature (849)..(852): n is a, c, g, or t
tagagagaattactatgagaggatcgcatcaccatcaccatcacggatcctatttaggtgacactatagaatcgtcgacccacgcgtccgcccacgcgtccgcagcgctgtacattgataaggatttggaatatgttcatactttcatgaatgtctgcttctttccacgattgaaagagttcattttgaaccaggattggaatgaccccaaatcccagcttcagcagtgttgcttgacacttaggacagaaggaaaagagccagacattcctctgtacaagactctgcagacagtgggcccatcccatgcccgaacctacactgtggctgtttatttcaagggagaaagaataggctgtgggaaaggaccaagtattcagcaagcggaaatgggagcagcaatggatgcgcttgaaaaatataattttccccagatggcccatcagaagcggttcatcgaacggaagtacagacaagagttaaaagaaatgaggtgggaaagagagcatcaagagagagagccagatgagactgaagacatcaagaaataaaggagggcatgcaagtgtggagtatttacttgctcagtaactgtgactgttgtctattgagacctagcctagttttcctgcagacaatgaatgaagtgtgctcattgaaataaaatacagagtcaaatcgctattgttgttttaatgatctgtttttagctggatggtctttattacaaagtattagatttttcttctatttaacggaaaacttgactttggtgaatgtgcattacttcctttttattttgctccttaaataaataaaattccaggaagccttnnnnnaaaaaannannnnaaaaaa

SEQ ID NO: 264 - DNA, 1100 bp, Homo Sapiens
  misc_feature (2)..(2): n is a, c, g, or t
  misc_feature (790)..(790): n is a, c, g, or t
  misc_feature (824)..(824): n is a, c, g, or t
  misc_feature (865)..(865): n is a, c, g, or t
  misc_feature (871)..(871): n is a, c, g, or t
  misc_feature (895)..(895): n is a, c, g, or t
  misc_feature (899)..(899): n is a, c, g, or t
  misc_feature (912)..(912): n is a, c, g, or t
  misc_feature (922)..(922): n is a, c, g, or t
  misc_feature (941)..(941): n is a, c, g, or t
  misc_feature (944)..(944): n is a, c, g, or t
  misc_feature (958)..(958): n is a, c, g, or t
  misc_feature (962)..(962): n is a, c, g, or t
  misc_feature (973)..(973): n is a, c, g, or t
  misc_feature (976)..(976): n is a, c, g, or t
  misc_feature (988)..(988): n is a, c, g, or t
  misc_feature (999)..(1000): n is a, c, g, or t
  misc_feature (1010)..(1010): n is a, c, g, or t
  misc_feature (1032)..(1032): n is a, c, g, or t
  misc_feature (1036)..(1036): n is a, c, g, or t
  misc_feature (1038)..(1038): n is a, c, g, or t
  misc_feature (1040)..(1040): n is a, c, g, or t
  misc_feature (1046)..(1046): n is a, c, g, or t
  misc_feature (1049)..(1049): n is a, c, g, or t
  misc_feature (1054)..(1054): n is a, c, g, or t
  misc_feature (1056)..(1056): n is a, c, g, or t
  misc_feature (1061)..(1061): n is a, c, g, or t
  misc_feature (1066)..(1066): n is a, c, g, or t
  misc_feature (1076)..(1076): n is a, c, g, or t
  misc_feature (1078)..(1078): n is a, c, g, or t
  misc_feature (1086)..(1087): n is a, c, g, or t
  misc_feature (1092)..(1092): n is a, c, g, or t
  misc_feature (1094)..(1094): n is a, c, g, or t
antagagagaattactatgagaggatcgcatcaccatcaccatcacggatcctatttaggtgacactatagaatcgtcgacccacgcgtccgggccggaggggtggggacggcgaggaggtggaggccggcgctccgctccgctccagctcggtttcatgtcccgccaggcgaaggatgacttcctgcggcactacacagtgtcggaccccaggactcaccccaagggctacaccgagtacaaagtaaccgcgcagttcatctcaaagaaggacccagaggatgtcaaagaggtggtggtctggaagcggtacagcgacttccgcaagctgcatggagacctggcctacacccaccgcaacctcttccgccgcctcgaggagttccctgctttcccccgggcccaggtgtttggccggtttgaagcctcagtgatcgaggagcggcgaaagggggcagaggacctgcttcgcttcactgtgcacatacctgcgctcaacaacagcccccagctcaaggagttcttccggggtggggaggtgacccgacccttggaggtgtccagggacctacacatcctgccaccccctctgatccccaccccgccccctgatgacccccggctatcccaactgctccctgcagaaaggaggggcctcgaggaattggaggtgccagtggaccccccaccatccagccctgcccaggaggccctggatctcctctttaactgtgagagcaccgaggaggcatctggttcccctgcccgaggccccctcaccgaggctgancttgccctcttcgaccccttctccaaggaagaangcgcagcccccagccccacccatgtggctgaactggcaacnatggangtggagtctgcaaggctggaccangaancctgggaaccagnagggcaggangaagaaaaagatggggaanganggcccacccctgcntacntaaccagccanaanctcatcacccangccctgcggannaaaagcaggngcttacctgctgcactccaggntatnanangggtgnacntttgntnaggantcccnatgacccttncntgcccccnnaaagngnaaaaaa

SEQ ID NO: 265 - DNA, 1287 bp, Homo Sapiens
  misc_feature (1)..(1): n is a, c, g, or t
  misc_feature (860)..(860): n is a, c, g, or t
  misc_feature (903)..(903): n is a, c, g, or t
  misc_feature (905)..(905): n is a, c, g, or t
  misc_feature (934)..(934): n is a, c, g, or t
  misc_feature (973)..(973): n is a, c, g, or t
  misc_feature (988)..(988): n is a, c, g, or t
  misc_feature (992)..(992): n is a, c, g, or t
  misc_feature (996)..(996): n is a, c, g, or t
  misc_feature (1004)..(1004): n is a, c, g, or t
  misc_feature (1014)..(1014): n is a, c, g, or t
  misc_feature (1040)..(1040): n is a, c, g, or t
  misc_feature (1042)..(1043): n is a, c, g, or t
  misc_feature (1046)..(1046): n is a, c, g, or t
  misc_feature (1048)..(1049): n is a, c, g, or t
  misc_feature (1056)..(1056): n is a, c, g, or t
  misc_feature (1059)..(1059): n is a, c, g, or t
  misc_feature (1066)..(1066): n is a, c, g, or t
  misc_feature (1074)..(1074): n is a, c, g, or t
  misc_feature (1076)..(1076): n is a, c, g, or t
  misc_feature (1082)..(1082): n is a, c, g, or t
  misc_feature (1085)..(1085): n is a, c, g, or t
  misc_feature (1100)..(1100): n is a, c, g, or t
  misc_feature (1108)..(1108): n is a, c, g, or t
  misc_feature (1126)..(1126): n is a, c, g, or t
  misc_feature (1143)..(1143): n is a, c, g, or t
  misc_feature (1149)..(1149): n is a, c, g, or t
  misc_feature (1159)..(1159): n is a, c, g, or t
  misc_feature (1168)..(1168): n is a, c, g, or t
  misc_feature (1172)..(1172): n is a, c, g, or t
  misc_feature (1177)..(1177): n is a, c, g, or t
  misc_feature (1187)..(1187): n is a, c, g, or t
  misc_feature (1189)..(1189): n is a, c, g, or t
  misc_feature (1209)..(1209): n is a, c, g, or t
  misc_feature (1213)..(1213): n is a, c, g, or t
  misc_feature (1222)..(1222): n is a, c, g, or t
  misc_feature (1248)..(1248): n is a, c, g, or t
  misc_feature (1250)..(1251): n is a, c, g, or t
  misc_feature (1256)..(1256): n is a, c, g, or t
  misc_feature (1258)..(1259): n is a, c, g, or t
  misc_feature (1269)..(1269): n is a, c, g, or t
  misc_feature (1278)..(1278): n is a, c, g, or t
  misc_feature (1287)..(1287): n is a, c, g, or t
nttagagagaattactatgagaggatcgcatcaccatcaccatcacggatcctatttaggtgacactatagaatcgtcgacccacgcgtccgcccacgcgtccgcagcaagagctaagagtgagctagaaagagaaaggaataagattcaaagtgaactggatggattacagtcagacaatgaaattctcaaagcagctgttgaacatcacaaagtgctcttagtagaaaaggatcgtgaattaatacgtaaagtacaagctgccaaagaagaaggttatcaaaaacttgtggtattacaagatgaaaagttagaactcgagaacaggttagcagatttggagaaaatgaaagtggaacatgatgtctggaggcaatctgaaaaggatcagtatgaagagaaattgcgggcttcacagatggcagaagagatcaccaggaaggagcttcagagtgttaggttaaaacttcagcaacaaattgtgactattgaaaatgcagagaaggaaaaaaatgaaaattctgacctaaaacagcaaatcagtagtttgcagatccaagtgacttcacttgcacagtcagagaatgacttgctgaattcaaaccaaatgctgaaggaaatggtggagagattaaaacaagaatgccgaaattttagaagccaagctgaaaaagcgcaactagaagctgaaaagacattggaagagaaacagatacagtggttggaagaaaagcataagcttcatgagcgtatcacagacagagaagaaaagtacaatcaagctaaggagaaactgcagcgagctgcaattgcccagaaaaagagaaatctcttcatgaaaaccaattgaaaagactacnagagaaagtagaagtcttggaggcaagaaggaagaattggaancngaaaatcaggtcttaaatagacaaatgtncttttgaagactatacaggctccaaaaagactaaagatntccgagaagacttantganttcnaagtctantttgggtccnaacatgcccccacagcatctatcatncnngtnannttcgtcntcngcctggntccagcangnactccnttnccccccttgcggagnacacctcnagggactcccctcttccnaaaactaaaaactggancccccnagaaaccctngggactgtnctcngaaangggttttggnancggcatcaaagggagtgggncccnaaccttgcntttacccgggccttaacctttttgtncnnacctngnngccccaaagnccccccccngtttggttn

SEQ ID NO: 266 - DNA, 898 bp, Homo Sapiens
  misc_feature (864)..(864): n is a, c, g, or t
  misc_feature (873)..(873): n is a, c, g, or t
  misc_feature (875)..(875): n is a, c, g, or t
  misc_feature (877)..(877): n is a, c, g, or t
  misc_feature (879)..(879): n is a, c, g, or t
  misc_feature (881)..(886): n is a, c, g, or t
  misc_feature (888)..(889): n is a, c, g, or t
  misc_feature (891)..(892): n is a, c, g, or t
  misc_feature (895)..(895): n is a, c, g, or t
  misc_feature (897)..(898): n is a, c, g, or t
tagagagattactatgagaggatcgcatcaccatcaccatcacggatcctatttaggtgacactatagaatcgtcgacccacgcgtccgctccctgcatcacagagagaagcaagcagaaggcccggaggagaacaagatccagctcctcctcctcttcttccagttcttctagctcctcttcttcctcctcgtcctcctcctcttcctccagtgatggccggaagaagcgggggaagtacaaggacaagaggaggaagaagaagaagaagaggaagaagctgaagaagaagggcaaggagaaggcggaagcacagcaggtggaggctctgccgggcccctcgctggaccagtggcaccgatcagctggggaggaagaggatggcccagtcctgacggatgagcagaagtcccgaatccaggccatgaagcccatgaccaaggaggagtgggatgcccggcagagcatcatccgcaaggtggtggaccctgagacggggcgcaccaggcttattaagggagatggcgaggtcctagaggaaatcgtaaccaaagaacgacacagagagatcaacaagcaagccacccgaggggactgcctggccttccagatgcgagctgggttgcttccctgagggcccccgctggccaaggcctgtggacgacgctggcggcccagcctgggcaggtttcagggtgccagtgggaagcctgatgggtgctggtggcctttcccccgtggattggtctctggcccagcccagtctcttctcaggggcagggggtggagggttggggtcaccggcctgcttggcaccccatctgaaagagcaagcacttctcagctattaaaggcccctggatngaaaaaaananananannnnnnanntnnaanann

SEQ ID NO: 267 - DNA, 1179 bp, Homo Sapiens
  misc_feature (913)..(913): n is a, c, g, or t
  misc_feature (933)..(933): n is a, c, g, or t
  misc_feature (954)..(954): n is a, c, g, or t
  misc_feature (977)..(977): n is a, c, g, or t
  misc_feature (980)..(980): n is a, c, g, or t
  misc_feature (983)..(983): n is a, c, g, or t
  misc_feature (1014)..(1015): n is a, c, g, or t
  misc_feature (1018)..(1018): n is a, c, g, or t
  misc_feature (1033)..(1033): n is a, c, g, or t
  misc_feature (1039)..(1039): n is a, c, g, or t
  misc_feature (1048)..(1048): n is a, c, g, or t
  misc_feature (1053)..(1053): n is a, c, g, or t
  misc_feature (1079)..(1079): n is a, c, g, or t
  misc_feature (1083)..(1083): n is a, c, g, or t
  misc_feature (1093)..(1093): n is a, c, g, or t
  misc_feature (1122)..(1122): n is a, c, g, or t
  misc_feature (1128)..(1128): n is a, c, g, or t
  misc_feature (1131)..(1131): n is a, c, g, or t
  misc_feature (1133)..(1133): n is a, c, g, or t
  misc_feature (1139)..(1140): n is a, c, g, or t
  misc_feature (1150)..(1150): n is a, c, g, or t
  misc_feature (1161)..(1168): n is a, c, g, or t
  misc_feature (1173)..(1173): n is a, c, g, or t
agagaaattactatgagaggatcgcatcaccatcaccatcacgggatcctatttaggtgacactatagaatcgtcgacccacgcgtccgcagcaggtgacttcagcactacagttatccaaaatgtcaataaagcgcaagtgaagattcgagcgaagaaagataatgtagcaggtgttactttgccagtatttgaacattaccatgaaggaactgacagttatgaactgactggtttagccagaggtggggaacagttggctaaattaaagaggaattatgccaaagcagtggaactactggtggaactagcttctctgcagacttcttttgttactttggatgaagctattaagataaccaacaggcgtgtaaatgccattgaacatgtcatcattccccggattgaacgtactcttgcttatatcatcacagagctggatgagagagagcgagaagagttctataggttaaagaaaatacaagagaagaaaaagattctaaaggaaaaatctgagaaggacttggagcaaaggagagcagctggagaggtgttggagcctgctaatcttctggctgaagagaaggacgaggatcttctatttgaataatctttcctgttctggttctttgagaaaccctaacactggcttcattttaattcacagtgtgtaggtttgatttgtgtggctatttattttttggcctaagaatttcactggttgtaaaatttacctagatgtctatttatgggattacttttgcagaatcataatttagcaaccatttatcatggatgaaagagatctgtaaaacctgcccaggaacttacagaatttactttgcagaagcgttatcatactccatttacatctgtgttacacgtgatctgcttaccaagcatattaggaaantacctcttaggaagcattancggtctcaggccaattactgnggagcagctttcattcctacccnctngcnaaccttggcgctgttgtctgaaattgctgcnnccntccttgttacctggnactccncaactttgngaaanccggccttttccttgcatgacaggtncctntctgtctgcntgggacccttccgcccatttaatgccacnggggtnaancngtaaanngttttaagtnaaaaaaaaaannnnnnnnaaaanggcggc

SEQ ID NO: 268 - DNA, 947 bp, Homo Sapiens
  misc_feature (1)..(1): n is a, c, g, or t
  misc_feature (852)..(852): n is a, c, g, or t
  misc_feature (866)..(866): n is a, c, g, or t
  misc_feature (886)..(886): n is a, c, g, or t
  misc_feature (890)..(890): n is a, c, g, or t
  misc_feature (900)..(900): n is a, c, g, or t
  misc_feature (904)..(904): n is a, c, g, or t
  misc_feature (910)..(910): n is a, c, g, or t
  misc_feature (912)..(912): n is a, c, g, or t
  misc_feature (924)..(924): n is a, c, g, or t
  misc_feature (927)..(930): n is a, c, g, or t
  misc_feature (934)..(937): n is a, c, g, or t
  misc_feature (940)..(942): n is a, c, g, or t
  misc_feature (944)..(947): n is a, c, g, or t
naaaagagaaattactatgagaggatcgcatcaccatcaccatcacggatcctatttaggtgacactatagaatcgtcgacccacgcgtccggcgtggcagggagggcgtccatggctgcagccaacaagggcaacaagcccagagtccggagtatccgctttgcggcaggccacgatgcagaaggatcccacagccacgtccactttgatgagaagctgcatgactcggtggtcatggtcacccaggagagtgacagcagctttctggtcaaggttggcttcctgaagatcctgcacaggtatgagattaccttcactctgcccccagtgcacaggctgagcaaggatgtccgcgaggcacctgtccccagcctgcacctcaagctcctcagcgtggtgcccgtccctgaaggttatagtgtcaagtgtgagtactcggcgcacaaagagggcgtcctcaaagaggagatactgctagcctgcgaaggtggcactggcacctgtgtgcgcgtgacggtgcaggcccgcgtcatggaccggcaccacggcacgcccatgctgctggatggtgtcaagtgtgtgggcgccgagctggaatacgactcagagcacagcgactggcacggctttgactgaggcccgaggccccgcctgccccgggcccctcagccttaaaccccgccttgtccccccgacatgctgcgtgatggtgtggcttcctcgcccctctctggggtgggtgtgggggtggagtggccttgcccacgcctctcacctctgccttcatttgtgctgccaccctgcccctccctcgtcctcctctcccgcttcctcctctctgtgtgcctcantctcctgccggaanaaatgggttgagccccaaanggangctgtctgangaanggaaangnaggccctggggntgnnnncccnnnnccnnncnnnn

SEQ ID NO: 269 - DNA, 790 bp, Homo Sapiens
  misc_feature (26)..(26): n is a, c, g, or t
  misc_feature (388)..(388): n is a, c, g, or t
  misc_feature (409)..(409): n is a, c, g, or t
  misc_feature (429)..(429): n is a, c, g, or t
  misc_feature (465)..(465): n is a, c, g, or t
  misc_feature (514)..(514): n is a, c, g, or t
  misc_feature (524)..(524): n is a, c, g, or t
  misc_feature (549)..(549): n is a, c, g, or t
  misc_feature (551)..(551): n is a, c, g, or t
  misc_feature (568)..(568): n is a, c, g, or t
  misc_feature (583)..(583): n is a, c, g, or t
  misc_feature (594)..(595): n is a, c, g, or t
  misc_feature (598)..(598): n is a, c, g, or t
  misc_feature (605)..(605): n is a, c, g, or t
  misc_feature (608)..(608): n is a, c, g, or t
  misc_feature (611)..(611): n is a, c, g, or t
  misc_feature (620)..(620): n is a, c, g, or t
  misc_feature (638)..(638): n is a, c, g, or t
  misc_feature (667)..(667): n is a, c, g, or t
  misc_feature (670)..(670): n is a, c, g, or t
  misc_feature (673)..(673): n is a, c, g, or t
  misc_feature (679)..(679): n is a, c, g, or t
  misc_feature (685)..(687): n is a, c, g, or t
  misc_feature (701)..(701): n is a, c, g, or t
  misc_feature (717)..(717): n is a, c, g, or t
  misc_feature (722)..(723): n is a, c, g, or t
  misc_feature (737)..(738): n is a, c, g, or t
  misc_feature (740)..(740): n is a, c, g, or t
  misc_feature (743)..(743): n is a, c, g, or t
  misc_feature (755)..(755): n is a, c, g, or t
  misc_feature (764)..(764): n is a, c, g, or t
  misc_feature (769)..(769): n is a, c, g, or t
  misc_feature (778)..(778): n is a, c, g, or t
  misc_feature (780)..(780): n is a, c, g, or t
  misc_feature (788)..(790): n is a, c, g, or t
acggtcctatttaggtgacactatanaatcgtcgacccacgcgtccgctcagggttcggtcccccgcccgctccgggcgtgggcgtgttctcggcgggcgtgcctggaggaggagctgggtccttgtgtggctgcagagtcagatggggcggggatttcggggcaccgggtcctcaccttcacgaaaaaggccccacagcacgtccccactacccgacgactcactcttcgtggcttctctctcctccccaagagcaggggtgggcctgtctcgcgttcccctgcgggagtcaggaagcgtccttcctacctaccagtcctcccctctggtgtctggggacacttcctgggggcctttcaggtggttggcgccggtgcaggacctganagcctgggggcgcggcctcanggtccccacatgccgcagangccaccgccagtacctgcgcagcggccctgactacnacttcgcgcgctaccggagcacagtgcacggggtgacccaggccttcgncgccgcctcncgggaggtgctggcggtggaatcananctgggcgggcctcgcangcaaccgctgctcgncggccacgtgnncancctgcanganctngaacaaacncggttgggcacggtggcncctgctgtaattgaatggagacgccaaanctngtngggcangaggannnttgtacggatgcancaactgaaaattgaangtaanntaaaaccattgganncnaancagcggggtttntccaagaancttangttttaatncnaaatcttnnn

SEQ ID NO: 270 - DNA, 965 bp, Homo Sapiens
  misc_feature (804)..(804): n is a, c, g, or t
  misc_feature (895)..(895): n is a, c, g, or t
  misc_feature (942)..(942): n is a, c, g, or t
tagagaaattactatgagaggatcgcatcaccatcaccatcacggatcctatttaggtgacactatagaatcgtcgacccacgcgtccgggcagctcctcggcgtcccagagcagcaccgaaagcgcaaaatcgacgcagggaccatggcagagccctcggcttcgcccagcaagcgccgtgacagcggggacaacagcgccccgagcggccaggagcgtgaggaccacggtctggagacaggcgatccgccgctgccgccgccgcccgtactgccggggccgggggaggagctcccgggcgcccggctcccggggggcggtggcgacgacggggcggggcgcgcaggacccccgcggggagactggggggtcgcatcgcgccagcacaatgaagaattttggcagtataataccttccaatactggaggaatcctttgcctcctattgatctggcagacattgaagatttaagtgaagacaccctgacagaagcaacacttcagggcaggaatgaaggggctgaggttgacatggagtcctgatgtaaggagccgaagcagtgggattggctgatttgaggagatgtctctaagtgaattctcgtattcttaagggaaaagttattttccatacttgaagttatatttccaaacctgagaaatgaagaaagattgttctgacattaaatacctacagttactactgaacctcttaataaggatttgtcaaggatagagtacagttgtaggggaagtattttatgtatgcattcttagagcaaaaagttttgtttaaattctanaattgaaggtactgatcttataaaaagaaattctagcagttttagaaataggtgggaaaactcaaatattcctcctatctgcaccaaaaanttttattttgtggtatataaaatgaatattgttttataataacttgnttaataaagtacttttctaatac

SEQ ID NO: 271 - DNA, 1194 bp, Homo Sapiens
  misc_feature (744)..(744): n is a, c, g, or t
  misc_feature (788)..(788): n is a, c, g, or t
  misc_feature (830)..(830): n is a, c, g, or t
  misc_feature (848)..(848): n is a, c, g, or t
  misc_feature (914)..(914): n is a, c, g, or t
  misc_feature (923)..(923): n is a, c, g, or t
  misc_feature (955)..(955): n is a, c, g, or t
  misc_feature (957)..(957): n is a, c, g, or t
  misc_feature (962)..(962): n is a, c, g, or t
  misc_feature (971)..(971): n is a, c, g, or t
  misc_feature (986)..(986): n is a, c, g, or t
  misc_feature (999)..(999): n is a, c, g, or t
  misc_feature (1006)..(1006): n is a, c, g, or t
  misc_feature (1008)..(1008): n is a, c, g, or t
  misc_feature (1030)..(1030): n is a, c, g, or t
  misc_feature (1047)..(1047): n is a, c, g, or t
  misc_feature (1058)..(1058): n is a, c, g, or t
  misc_feature (1069)..(1069): n is a, c, g, or t
  misc_feature (1073)..(1073): n is a, c, g, or t
  misc_feature (1078)..(1078): n is a, c, g, or t
  misc_feature (1103)..(1103): n is a, c, g, or t
  misc_feature (1117)..(1117): n is a, c, g, or t
  misc_feature (1120)..(1120): n is a, c, g, or t
  misc_feature (1126)..(1126): n is a, c, g, or t
  misc_feature (1133)..(1133): n is a, c, g, or t
  misc_feature (1141)..(1141): n is a, c, g, or t
  misc_feature (1163)..(1163): n is a, c, g, or t
  misc_feature (1169)..(1171): n is a, c, g, or t
  misc_feature (1173)..(1173): n is a, c, g, or t
  misc_feature (1178)..(1178): n is a, c, g, or t
  misc_feature (1182)..(1183): n is a, c, g, or t
  misc_feature (1188)..(1188): n is a, c, g, or t
  misc_feature (1192)..(1192): n is a, c, g, or t
tagagaaattactatgagaggatcgcatcaccatcaccatcacggatcctatttaggtgacactatagaatcgtcgacccacgcgtccggggccaggggcggccccgaaattaggaagcggagggggagcagtctgcaggtctgcggggctaagtgtcgcggcggcgcacctcgcgtcaagaatccggaggaggagactgcaaggataggcccaggagtaatggagtccaaagaggaactagcggcaaacaatctcaacggggaaaatgcccaacaagaaaacgaaggaggggagcaggcccccacgcagaatgaagaagaatcccgccatttgggagggggtgaaggccagaagcctggaggaaatatcaggcgggggcgagttaggcgacttgtccctaattttcgatgggccatacctaataggcatattgagcacaatgaagcgagagatgatgtagaaaggtttgtagggcagatgatggaaatcaagagaaagactagggaacagcagatgaggcactatatgcgcttccaaactcctgaacctgacaaccattatgacttttgcctcataccttgaatcctaaaagttttcgctgaggttaatgtgaacactgctttacaagcttgtatttttgtgatttactttttctgtaagccttttggtgtttacacttaccagtttctaatggaaattagaattctaattgaatattgttttgtctcagcctaaaagttacngtcagcatggcaattcacctattttaggaaaaatactcttttcntaatatgaaatgcataaagcagttcaaaaagcagtctgtatnccatcatcttcctttttnattccagtccttatttttgtaaatattacttttcctcctccggctacctggactcaaaattctcanttgtctttnacagttttttttcttgtccctgacccaaaaanantgatnctttccccnaattccatgtttganattttaaaaatgnttgttcnangggtttttcaaaatgggttttncctttttttttaaaacnccttgggggcnggccgggggcntttnaaatnttgggacctttcttccaaactcccnaaatgggggctccnaanttcccntttttanaaacttcnttaaataattttgaagtttacnaaatcnnngnccctngggnnggggntacnaa

SEQ ID NO: 272 - DNA, 1114 bp, Homo Sapiens
  misc_feature (784)..(784): n is a, c, g, or t
  misc_feature (917)..(917): n is a, c, g, or t
  misc_feature (960)..(960): n is a, c, g, or t
  misc_feature (965)..(965): n is a, c, g, or t
  misc_feature (967)..(967): n is a, c, g, or t
  misc_feature (986)..(986): n is a, c, g, or t
  misc_feature (989)..(989): n is a, c, g, or t
  misc_feature (999)..(999): n is a, c, g, or t
  misc_feature (1014)..(1014): n is a, c, g, or t
  misc_feature (1050)..(1050): n is a, c, g, or t
  misc_feature (1054)..(1054): n is a, c, g, or t
  misc_feature (1059)..(1059): n is a, c, g, or t
  misc_feature (1066)..(1066): n is a, c, g, or t
  misc_feature (1072)..(1072): n is a, c, g, or t
  misc_feature (1075)..(1075): n is a, c, g, or t
  misc_feature (1085)..(1085): n is a, c, g, or t
  misc_feature (1089)..(1089): n is a, c, g, or t
  misc_feature (1092)..(1093): n is a, c, g, or t
  misc_feature (1096)..(1096): n is a, c, g, or t
  misc_feature (1103)..(1103): n is a, c, g, or t
  misc_feature (1109)..(1109): n is a, c, g, or t
  misc_feature (1111)..(1112): n is a, c, g, or t
tagagaaattactatgagaggatcgcatcaccatcaccatcacggatcctatttaggtgacactatagaatcgtcgacccacgcgtccgattatgacccggcggagtttatggagggcggcccgcaggaggcagaccgcttggatgagctggagtatgaggaggtggagctgtataaaagcagccaccgggacaagctgggcctgatggtttgctaccgcacggacgacgaggaggacctgggcatttatgtcggagaggtaaatcccaacagcattgcagccaaagacggccggatccgtgagggagaccgcatcatccagattaacggtgtagacgtccagaaccgggaagaggcggtggccatcctgagccaggaagagaacaccaacatctccctgctggtggcccgacctgagagtcagctggcgaaaaggtggaaggacagcgaccgggatgacttcctggatgactttggctctgagaatgagggggagctgcgtgctcgtaaactgaaatcaccccctgcccagcagcccggaaacgaagaggagaagggggctcccgatgccggcccaggcctgagcaacagccaggagctggacagcggggtgggccggactgacgagagcacccggaacgaagagagctctgagcacgacctgctgggggacgaacccccgagctccaccaacaccccgggaagcctgcgcaagtttggcctgcaaggggacgccctgcagagccgggacttccatttcagcatggactctctgctggccganggggcggggctgggagggggcgacgtcccgggcctcacggatgaggagtatgagcgctaccgtgagctcctggagatcaagtgccacctggagaacggcaaccagctgggcctcctcttttcccgggcctccngaggcaacagcgccctggacgtcaaccgcaacgaaagcctggnccacnanatggcccatgctggagganganctaaggcacntggaattcagtgccncaacatactgcgggcccaaaaaatgcacaacctgcntganccctncattaangcctgnctnctggaagaanaaanccnntanaactggnggccancnngc

SEQ ID NO: 273 - DNA, 1146 bp, Homo Sapiens
  misc_feature (764)..(764): n is a, c, g, or t
  misc_feature (810)..(810): n is a, c, g, or t
  misc_feature (815)..(815): n is a, c, g, or t
  misc_feature (863)..(863): n is a, c, g, or t
  misc_feature (904)..(904): n is a, c, g, or t
  misc_feature (911)..(911): n is a, c, g, or t
  misc_feature (916)..(916): n is a, c, g, or t
  misc_feature (1000)..(1000): n is a, c, g, or t
  misc_feature (1006)..(1006): n is a, c, g, or t
  misc_feature (1013)..(1013): n is a, c, g, or t
  misc_feature (1022)..(1022): n is a, c, g, or t
  misc_feature (1037)..(1037): n is a, c, g, or t
  misc_feature (1039)..(1039): n is a, c, g, or t
  misc_feature (1047)..(1047): n is a, c, g, or t
  misc_feature (1055)..(1055): n is a, c, g, or t
  misc_feature (1069)..(1069): n is a, c, g, or t
  misc_feature (1072)..(1072): n is a, c, g, or t
  misc_feature (1079)..(1080): n is a, c, g, or t
  misc_feature (1082)..(1083): n is a, c, g, or t
  misc_feature (1085)..(1085): n is a, c, g, or t
  misc_feature (1091)..(1091): n is a, c, g, or t
  misc_feature (1095)..(1095): n is a, c, g, or t
  misc_feature (1098)..(1099): n is a, c, g, or t
  misc_feature (1102)..(1102): n is a, c, g, or t
  misc_feature (1104)..(1104): n is a, c, g, or t
  misc_feature (1111)..(1111): n is a, c, g, or t
  misc_feature (1114)..(1114): n is a, c, g, or t
  misc_feature (1124)..(1124): n is a, c, g, or t
  misc_feature (1127)..(1127): n is a, c, g, or t
  misc_feature (1134)..(1134): n is a, c, g, or t
  misc_feature (1136)..(1136): n is a, c, g, or t
tagagaaattactatgagaggatcgcatcaccatcaccatcacggatcctatttaggtgacactatagaatcgtcgacccacgcgtccgcccacgcgtccgaaacactgggcaaggaccacccagccgtggctgcgacactaaacaacctggcagtcctgtatggcaagaggggcaagtacaaggaggctgagccattgtgcaagcgggcactggagatccgggagaaggtcctgggcaagtttcacccagatgtggccaagcagctcagcaacctggccctgctgtgccagaaccagggcaaagctgaggaggtggaatattactatcggcgggcactggagatctatgctacacgcctcgggcccgatgaccccaatgtggccaagaccaagaacaacctggcttcctgctacctgaagcagggcaagtaccaggatgcggagaccttgtacaaggagatcctcacccgcgctcatgagaaagagtttggctctgtcaatggggacaacaagcccatctggatgcacgcagaggagcgggaggaaagcaaggataagcgccgggacagcgccccctatggggaatacggcagctggtacaaggcctgtaaagtagacagccccacagtcaacaccaccctgcgcagcttgggggccctataccggcgccagggcaagctggaagccgcgcacacactagaggactgtgccagccgtaaccgcaagcagggtttggaccccgcaagccagaccaaggtggtanaactgctgaaagatggcagtggcaggcggggagaccgccgcagcanccganacatggctgggggtgccggccctcggtctgagtctgacctcgaggacntgggacctacagctgagtggaatggggatggcattggctcnttgaagncgcancgtttcctttgggaaactccggatgccctgaggcccaccattgaaatgctgttaaaaaaactgcaggggggcaccccccaggancccccntaacccnagaataaancgggcaatttccctnanttcttcanaaaaactngaaaaaccaacccnccntggaggnnanntntctttnaaancgnnttntnattccanctnctgaaccttnccnaaaaaantncctgggggct

SEQ ID NO: 274 - DNA, 1061 bp, Homo Sapiens
  misc_feature (958)..(958): n is a, c, g, or t
  misc_feature (994)..(994): n is a, c, g, or t
  misc_feature (1033)..(1033): n is a, c, g, or t
  misc_feature (1057)..(1057): n is a, c, g, or t
tagagagaattactatgagaggatcgcatcaccatcaccatcacggatcctatttaggtgacactatagaatcgtcgacccacgcgtccgcccacgcgtccgatgtaggcaccggtccgagtgcctgccctctgtccccgcggctgggtctcgtctgctccggttcctgggctcctaattcttggtccagcttcttccaggacaggaaaaggaggggaaatctcgacatggaaaaactctacagtgaaaatgaaggaatggcttcaaaccaaggaaagatggaaaatgaagaacagccacaagacgagagaaagccagaagtaacttgtactctggaagacaagaagttagaaaacgagggaaagacagaaaacaagggcaaaacaggagatgaggaaatgttaaaggataaaggaaagccagagagtgagggagaggcaaaagaaggaaagtcagagagggagggagagtcagagatggagggaggatcagagagagagggaaaaccagagatagagggaaagccagagagtgaaggagagccagggagtgaaacaagggctgcaggaaagcgcccagctgaggatgatgtacccaggaaagccaaaagaaaaactaataaggggctggctcattacctcaaggagtataaagaggccatacacgatatgaatttcagcaatgaggacatgataagagaatttgacaatatggctaaggtgcaggatgagaagagaaaaagcaaacagaaattgggggcgtttttgtggatgcaaagaaatttacaggaccccttctaccctagaggtccaagggaattcaggggtggctgcagggccccacgaagggacattgaagacattccttatgtgtagtgtccctggcaggcatttaccaggccatgtgctttaccgttacggtaatactttactttaggcatccctcctgttgctagcanccttttgacctatctgcatgcagtgttctcagtagnaatgttcctctgttacatggaaaaattgttgatggtgcnttgtaaattaaaaacccacttgcnaacc

SEQ ID NO: 275 - DNA, 1173 bp, Homo Sapiens
  misc_feature (682)..(682): n is a, c, g, or t
  misc_feature (736)..(736): n is a, c, g, or t
  misc_feature (843)..(843): n is a, c, g, or t
  misc_feature (890)..(890): n is a, c, g, or t
  misc_feature (901)..(901): n is a, c, g, or t
  misc_feature (932)..(932): n is a, c, g, or t
  misc_feature (974)..(974): n is a, c, g, or t
  misc_feature (1004)..(1004): n is a, c, g, or t
  misc_feature (1016)..(1016): n is a, c, g, or t
  misc_feature (1019)..(1019): n is a, c, g, or t
  misc_feature (1026)..(1026): n is a, c, g, or t
  misc_feature (1028)..(1028): n is a, c, g, or t
  misc_feature (1032)..(1032): n is a, c, g, or t
  misc_feature (1037)..(1037): n is a, c, g, or t
  misc_feature (1041)..(1041): n is a, c, g, or t
  misc_feature (1050)..(1050): n is a, c, g, or t
  misc_feature (1060)..(1061): n is a, c, g, or t
  misc_feature (1068)..(1068): n is a, c, g, or t
  misc_feature (1092)..(1092): n is a, c, g, or t
  misc_feature (1097)..(1097): n is a, c, g, or t
  misc_feature (1104)..(1104): n is a, c, g, or t
  misc_feature (1113)..(1113): n is a, c, g, or t
  misc_feature (1115)..(1115): n is a, c, g, or t
  misc_feature (1119)..(1119): n is a, c, g, or t
  misc_feature (1127)..(1127): n is a, c, g, or t
  misc_feature (1129)..(1129): n is a, c, g, or t
  misc_feature (1136)..(1136): n is a, c, g, or t
  misc_feature (1151)..(1151): n is a, c, g, or t
  misc_feature (1154)..(1154): n is a, c, g, or t
  misc_feature (1157)..(1157): n is a, c, g, or t
  misc_feature (1162)..(1162): n is a, c, g, or t
  misc_feature (1165)..(1165): n is a, c, g, or t
  misc_feature (1171)..(1171): n is a, c, g, or t
agaaattactatgagaggatcgcatcaccatcaccatcacggatcctatttaggtgacactatagaatcgtcgacccacgcgtccgcaggatcggacgtgctacccctcccggtcccggccctggcccagccagcccagccctcgaggctcgatgcctgtgccaaggccaggggcagccagagggcagctggatggccacgtgcaggggtcaaggctgggccctgcagtggggcgggccgccagccccagcagtttacagacgcatggctcttcctcccagagcagccggcagctacctggaccggaaatgtcctcatcccctccctggggccaggctctgccctggccttcctctgtgaacccctcctttctttgtgctggtgtctgggaccaaaaagggggaatatgggagggcagagtggggaggggagtccatgggcctggggccccaagccggggcgtctgagctccccaggcatgaccaaacctcagtggaggggcctctgcttcaggccccgcctggctgacattctgagcccccctcggaggccccgccacagccaacctgcccagtctttcctctgggcttgacccgccaggggagttctccaggcctagggccaggagagaggccctggcaccctggcgtgggtgcccgccaaacgccctgcgaccgctcanaagcacaaatgctgtccatggccgtgaggctgcctgccaggtgaatggacatancgtgagaggcggtgaggccagggcttccagcctcgtgctgtctcgggactcctgaccgtggtgtgcgtgtgtgcccgtctgtgactttctactcaccaaggttgaanaaaggaaacggggaaaatcaaaaggggttcaaaccccacctcaatangtggaggggancgcctgccattggttgtatttttgttctganttttcggtgccgtgttcctaactactccatcccatgacctcnccacacctactggggcatctggctggtgcntgctgccatggncancccccantntcancttgnaaangggtcttgnacccccaagnncaaaacntctttggaaaaaaaagggtggccntgggnaaaaaangaagaaccnangggnttactttntnaaaatgnttcccaaaaggaatncantancccanggncccccnat

SEQ ID NO: 276 - DNA, 1108 bp, Homo Sapiens
  misc_feature (34)..(34): n is a, c, g, or t
  misc_feature (49)..(49): n is a, c, g, or t
  misc_feature (57)..(58): n is a, c, g, or t
  misc_feature (70)..(70): n is a, c, g, or t
  misc_feature (283)..(283): n is a, c, g, or t
  misc_feature (547)..(547): n is a, c, g, or t
  misc_feature (777)..(778): n is a, c, g, or t
  misc_feature (782)..(782): n is a, c, g, or t
  misc_feature (810)..(810): n is a, c, g, or t
  misc_feature (866)..(866): n is a, c, g, or t
  misc_feature (868)..(868): n is a, c, g, or t
  misc_feature (885)..(885): n is a, c, g, or t
  misc_feature (900)..(900): n is a, c, g, or t
  misc_feature (908)..(908): n is a, c, g, or t
  misc_feature (933)..(933): n is a, c, g, or t
  misc_feature (941)..(941): n is a, c, g, or t
  misc_feature (943)..(943): n is a, c, g, or t
  misc_feature (953)..(954): n is a, c, g, or t
  misc_feature (998)..(998): n is a, c, g, or t
  misc_feature (1001)..(1003): n is a, c, g, or t
  misc_feature (1006)..(1006): n is a, c, g, or t
  misc_feature (1014)..(1014): n is a, c, g, or t
  misc_feature (1023)..(1023): n is a, c, g, or t
  misc_feature (1036)..(1036): n is a, c, g, or t
  misc_feature (1038)..(1039): n is a, c, g, or t
  misc_feature (1045)..(1045): n is a, c, g, or t
  misc_feature (1047)..(1047): n is a, c, g, or t
  misc_feature (1049)..(1049): n is a, c, g, or t
  misc_feature (1066)..(1066): n is a, c, g, or t
  misc_feature (1070)..(1070): n is a, c, g, or t
  misc_feature (1072)..(1072): n is a, c, g, or t
  misc_feature (1088)..(1088): n is a, c, g, or t
  misc_feature (1090)..(1090): n is a, c, g, or t
  misc_feature (1103)..(1103): n is a, c, g, or t
  misc_feature (1108)..(1108): n is a, c, g, or t
atagagagattactatgagaggatcgcatcaccntcaccatcacggatnctatttanngtgacactatanaatcgtcgacccacgcgtccgccattgctgtgcatgagaaagaggagagtctctggcctagggtggccgtcttctccacattggcacccggagtcctccatggggcgaggctccgaagtctgcaggtcgttgatctggagtcccggaagaccacgtacacctcagatgtcagtgacagtgaggagctgagtagcctgcaggtcctagatgcanacacctttgccttctgctgtgcttcgggccggctggggcttgttgacacccggcagaagtgggcaccgttggagaatcgcagccctggccctgggtctggtggagagagatggtgtgctgaagttgggagctggggccagggccctgggcccagcattgccagccttggctcagatgggcgtctttgtcttcttgacccccgggatctctgccatcctgtgagctcagtccagtgcccagtatccgtacctagccctgacccanagctgctgcgagtgacttgggccccaggcctgaagaattgcttggccatctcaggttttgatggtacagtccaggtctatgatgccacatcttgggatggaacacggagccaagatggaacacgggagccaagtataacctctcttcactcacagaggtcacatcttcctagatggaaatggggatggaccctgctccttttggtcaccacccacacctggcatccctgnnagancaaaggactttgtttatcagcaacaaantgatgccctctctgcatgtgtgggactgggtggaccttttgtgccccccccgcctnanaccaagcatctttttcnatctaggccctctanaaaagggnaagaacttgctgtaataaccaaggntgctgaantnaggactcaanngaactaccagtcccctgttaaccatcttgtgtggcctttgggcnaannntgnccacgtcncttaccctnagtttccttaatntnnaaaatngngnaaaataaaaaactaccncttnantgatatttgccaaagntnaaaaaaaaacccntggan

SEQ ID NO: 277 - DNA, 1159 bp, Homo Sapiens
  misc_feature (848)..(848): n is a, c, g, or t
  misc_feature (865)..(865): n is a, c, g, or t
  misc_feature (922)..(922): n is a, c, g, or t
  misc_feature (931)..(931): n is a, c, g, or t
  misc_feature (933)..(933): n is a, c, g, or t
  misc_feature (936)..(936): n is a, c, g, or t
  misc_feature (952)..(952): n is a, c, g, or t
  misc_feature (992)..(992): n is a, c, g, or t
  misc_feature (997)..(997): n is a, c, g, or t
  misc_feature (1003)..(1003): n is a, c, g, or t
  misc_feature (1021)..(1021): n is a, c, g, or t
  misc_feature (1029)..(1030): n is a, c, g, or t
  misc_feature (1038)..(1038): n is a, c, g, or t
  misc_feature (1056)..(1057): n is a, c, g, or t
  misc_feature (1059)..(1059): n is a, c, g, or t
  misc_feature (1063)..(1063): n is a, c, g, or t
  misc_feature (1075)..(1075): n is a, c, g, or t
  misc_feature (1077)..(1077): n is a, c, g, or t
  misc_feature (1087)..(1087): n is a, c, g, or t
  misc_feature (1098)..(1099): n is a, c, g, or t
  misc_feature (1101)..(1101): n is a, c, g, or t
  misc_feature (1106)..(1106): n is a, c, g, or t
  misc_feature (1115)..(1115): n is a, c, g, or t
  misc_feature (1126)..(1126): n is a, c, g, or t
  misc_feature (1132)..(1132): n is a, c, g, or t
  misc_feature (1138)..(1138): n is a, c, g, or t
  misc_feature (1140)..(1140): n is a, c, g, or t
  misc_feature (1143)..(1143): n is a, c, g, or t
  misc_feature (1148)..(1149): n is a, c, g, or t
  misc_feature (1152)..(1152): n is a, c, g, or t
  misc_feature (1156)..(1156): n is a, c, g, or t
  misc_feature (1158)..(1158): n is a, c, g, or t
tagagagattactatgagaggatcgcatcaccatcaccatcacggatcctatttaggtgacactatagaatcgtcgacccacgcgtccgcggagaagcaggccgtgcgccgggcgctgatcgaggagcggggccgcttctgcaccttcatcaccttcctgcagcctgtggtgaatggagagctgaccatgctgggagagatcacccacctgcagggcatcatcgacgacttggtggtgctgacagcagaaccccacaaactgcctcccgccagcgagcaggtaatcaaagacctaaagggctcggactacagctggtcctaccagaccccaccctcatcacccagcagctccagctcccggaagtccagcatgtgcagtgcccccagcagcagtagcagtgccaagggtggcggagccccatggcctgggggtgcccaaacatactcacccagttccacctgtcgctaccgcagcctggcgcagccagccaccaccaccgctcgcctctccagcgtttcctcccatgactctggcttcgtctcccaggacgccacctactccaagcccccctcgcctatgccttcagacatcaccagccagaagtcctccagctctgcatcttccgaggcctcggaaacctgccagtccgttagcgagtgcagctcccccacctcggactggtccaaggtcggctcccatgagcagccctcaggcgccactctgcagcggaggaaggaccgagtggagctcctgcgagacacagagccaggccctgccagtgggggcaccctgggccccagcggggaagaggcaccgcgaccccggatgtcccctgccaccatcgcanccaagcacggtgaggangtgtcccccgccgccagtgacctggccatggtgctgacgcggggcctgaacctggancaccaaaanancanccgggactcgctgcantactccagcggctacagcacgcaaaccaccacgcccttcntgctntaaganaccatcccttcccaaggntccaaatnnaatgctantccgtgaatggggatgcnnanagcnagggcccccccnantttaaaaatnatccacatccnngnaaaanaaattcccnaaaatacgccnctgatnaaaaangnccnacctnnttntggntnc

SEQ ID NO: 278 - DNA, 881 bp, Homo Sapiens
  misc_feature (3)..(3): n is a, c, g, or t
  misc_feature (686)..(686): n is a, c, g, or t
  misc_feature (781)..(781): n is a, c, g, or t
  misc_feature (794)..(794): n is a, c, g, or t
  misc_feature (797)..(797): n is a, c, g, or t
  misc_feature (803)..(804): n is a, c, g, or t
  misc_feature (808)..(808): n is a, c, g, or t
  misc_feature (818)..(818): n is a, c, g, or t
  misc_feature (820)..(820): n is a, c, g, or t
  misc_feature (830)..(830): n is a, c, g, or t
  misc_feature (832)..(832): n is a, c, g, or t
  misc_feature (834)..(834): n is a, c, g, or t
  misc_feature (842)..(842): n is a, c, g, or t
  misc_feature (844)..(844): n is a, c, g, or t
  misc_feature (852)..(852): n is a, c, g, or t
  misc_feature (857)..(857): n is a, c, g, or t
  misc_feature (859)..(859): n is a, c, g, or t
  misc_feature (861)..(861): n is a, c, g, or t
  misc_feature (863)..(863): n is a, c, g, or t
  misc_feature (881)..(881): n is a, c, g, or t
aanttagagaaattactatgagaggatcgcatcaccatcaccatcacggatcctatttaggtgacactatagaatcgtcgacccacgcgtccgggctggctccagaaaccacagagaccccggctggggcctcagaaacagcccaggccacagacctcagcttaagcccaggaggggaatcaaaggccaactgcagccccgaagacccatgccaagaaacagtgtccaaaccagaagtgagcaaagaggccactgcagaccaggggtccaggctggagtctgcagccccacctgaaccagccccagagcctgctccccaaccagacccccggccagattcccagcctacccccaagccagcccttcaaccagagctccctacccaggaggaccccacccctgagattctgtctgagagtgtaggggaaaagcaagagaatggggcagtggtgcccctgcaggctggtgatggggaagagggcccagcccctgagcctcactcaccaccctcaaaaaaatcccccccagccaatggggcccccccccgagtgctgcagcagctggttgaggaggatcgaatgagaagggcacacagtgggcatccaggatctccccgaggtagcctgagccgccaccccagctcccagctggcaggtcctggggtggaggggggtgaaggcacccanaaacctcgggactacatcatccttgccatcctgtcctgcttctgccccatgtggcctgtcaacatcgtggccttcgcttatgctgtcatgttccngaaacacctgcancanggggannttgnacggggcccnancgttctgggncngntatccaancntctttaancatcntngngnttggttgggggggaattn

SEQ ID NO: 279 - DNA, 1029 bp, Homo Sapiens
  misc_feature (691)..(691): n is a, c, g, or t
  misc_feature (778)..(778): n is a, c, g, or t
  misc_feature (782)..(782): n is a, c, g, or t
  misc_feature (806)..(806): n is a, c, g, or t
  misc_feature (837)..(837): n is a, c, g, or t
  misc_feature (849)..(849): n is a, c, g, or t
  misc_feature (882)..(882): n is a, c, g, or t
  misc_feature (884)..(884): n is a, c, g, or t
  misc_feature (891)..(891): n is a, c, g, or t
  misc_feature (898)..(898): n is a, c, g, or t
  misc_feature (918)..(918): n is a, c, g, or t
  misc_feature (922)..(922): n is a, c, g, or t
  misc_feature (924)..(924): n is a, c, g, or t
  misc_feature (932)..(932): n is a, c, g, or t
  misc_feature (939)..(939): n is a, c, g, or t
  misc_feature (946)..(946): n is a, c, g, or t
  misc_feature (949)..(949): n is a, c, g, or t
  misc_feature (952)..(952): n is a, c, g, or t
  misc_feature (956)..(956): n is a, c, g, or t
  misc_feature (960)..(960): n is a, c, g, or t
  misc_feature (962)..(962): n is a, c, g, or t
  misc_feature (966)..(966): n is a, c, g, or t
  misc_feature (982)..(982): n is a, c, g, or t
  misc_feature (985)..(986): n is a, c, g, or t
  misc_feature (995)..(995): n is a, c, g, or t
  misc_feature (1001)..(1001): n is a, c, g, or t
  misc_feature (1003)..(1003): n is a, c, g, or t
  misc_feature (1015)..(1015): n is a, c, g, or t
  misc_feature (1017)..(1017): n is a, c, g, or t
  misc_feature (1025)..(1025): n is a, c, g, or t
  misc_feature (1027)..(1028): n is a, c, g, or t
atagagagaattaactatgagaggatcgcatcaccatcaccatcacggatcctatttaggtgacactatagaatcgtcgacccacgcgtccgcgagcgagcgagcggagaggcggcctcaaagtttgcggcgggcgggcgggcgcggagcctccaagatgccgttccacccggtgacggcggcgttgatgtaccggggcatctacaccgtgcccaacctgctgtcggagcagcgcccggtggacatcccggaggacgagctggaggagatccgagaggccttcaaggtgtttgaccgtgacggcaatggcttcatctccaagcaggagctgggcacagccatgcgctcactgggttacatgcccaacgaggtggagctggaggtcatcatccagcggctggacatggatggtgatggtcaagtggactttgaggagtttgtgacccttctgggacccaaactctccacctcagggatcccagagaagttccatggcaccgactttgatactgtcttctggaagtgcgacatgcagaagctgacggtggatgagctgaagcggctgctctacgacaccttctgcgagcacctgtccatgaaggacatagagaacatcatcatgacggaggaggagagccacctgggcacagccgaggagtgtcccgtggatgtggagacctgctccaaccancagatccgccagacttgcgtgcgcaagagtctcatctgcgccttcgccatcgccttcatcatcagtgtcatgctcattgcggccaancagntgctgcgcagtggcatgaaataanacgccacctggatgccccatccaccgcatgnggtgcccgttgncccgccccaaaccaaccgccgacctgaaaaacntntcccttngcccggnttccctggggccccccattntggngngtactttnagggccntgggtantcnaanggancccntncccnaccccaccaacgggtnctnnactttgaancttgtngnccttggcttgtngnaaggcccngnng

SEQ ID NO: 280 - DNA, 1179 bp, Homo Sapiens
  misc_feature (834)..(834): n is a, c, g, or t
  misc_feature (874)..(874): n is a, c, g, or t
  misc_feature (914)..(914): n is a, c, g, or t
  misc_feature (919)..(919): n is a, c, g, or t
  misc_feature (921)..(921): n is a, c, g, or t
  misc_feature (945)..(945): n is a, c, g, or t
  misc_feature (970)..(970): n is a, c, g, or t
  misc_feature (988)..(988): n is a, c, g, or t
  misc_feature (992)..(992): n is a, c, g, or t
  misc_feature (995)..(995): n is a, c, g, or t
  misc_feature (999)..(999): n is a, c, g, or t
  misc_feature (1015)..(1015): n is a, c, g, or t
  misc_feature (1020)..(1020): n is a, c, g, or t
  misc_feature (1031)..(1031): n is a, c, g, or t
  misc_feature (1042)..(1042): n is a, c, g, or t
  misc_feature (1077)..(1077): n is a, c, g, or t
  misc_feature (1080)..(1080): n is a, c, g, or t
  misc_feature (1083)..(1083): n is a, c, g, or t
  misc_feature (1087)..(1087): n is a, c, g, or t
  misc_feature (1089)..(1089): n is a, c, g, or t
  misc_feature (1108)..(1108): n is a, c, g, or t
  misc_feature (1140)..(1140): n is a, c, g, or t
  misc_feature (1147)..(1149): n is a, c, g, or t
  misc_feature (1153)..(1153): n is a, c, g, or t
  misc_feature (1168)..(1168): n is a, c, g, or t
  misc_feature (1172)..(1172): n is a, c, g, or t
agagagattactatgagaggatcgcatcaccatcaccatcacggatcctatttaggtgacactatagaatcgtcgacccacgcgtccgcgcaggacctcctctcccagatcgcccagctgcaggaggagaacaagcagctcatgaccaacctctcccacaaggatgtcaacttctcagaggaggagttccagaagcatgaaggcatgtcagagcgggagcgacaggtgatgaagaagctgaaggaggtggtggacaaacaacgcgacgagatccgcgccaaggacagggagctgggcctgaaaaatgaggacgttgaggctttacagcagcagcagacacggctgatgaagatcaaccatgaccttcggcaccgggtcacggtggtggaggcccaggggaaagccctgatcgaacagaaggtggagctggaggcagacctgcagaccaaggagcaggagatgggcagcctgcgagcagagctggggaagttgcgagagaggctgcagggggagcacagccagaatggggaggaggagcctgagacggagccggtgggagaggagagcatctccgacgcagagaaggtggccatggatctcaaggaccccaaccgcccccggttcaccctgcaggagctgcgggacgtgctgcacgagaggaacgagctcaagtccaaggtgttcttgctgcaggaggagctggcttactataagagtgaagaaatggaagaggaaaaccgaataccccaacccccacccatcgcccacccgaggacgtccccccagccggagtcgggcatcaagcgactgtttagcttcttctcccgagataanaagcgcctggccaacacacagagaaacgtgcacatccagnagtcctttggacagtgggcaaacacccaccgcgatgacgnttacncngagcaaggacaggaagccctgcancatctgtgaccttggcccatctccnccctccaacctggactgncccnccnccancgcctgcaaccgaaantgcancccaggggtcnttgctgcctcnagcctttcggtgcaatgcccctgaaaactgacccntcnaanaaantngtttgattttaggatggancttttaaaacttgaccccaactttaaaaaatnttttttnnncccngggctatcctgtttncaanaaaaact

SEQ ID NO: 281 - DNA, 1164 bp, Homo Sapiens
  misc_feature (797)..(797): n is a, c, g, or t
  misc_feature (926)..(926): n is a, c, g, or t
  misc_feature (930)..(930): n is a, c, g, or t
  misc_feature (933)..(933): n is a, c, g, or t
  misc_feature (946)..(946): n is a, c, g, or t
  misc_feature (951)..(951): n is a, c, g, or t
  misc_feature (962)..(962): n is a, c, g, or t
  misc_feature (972)..(972): n is a, c, g, or t
  misc_feature (977)..(977): n is a, c, g, or t
  misc_feature (998)..(998): n is a, c, g, or t
  misc_feature (1008)..(1008): n is a, c, g, or t
  misc_feature (1015)..(1015): n is a, c, g, or t
  misc_feature (1028)..(1028): n is a, c, g, or t
  misc_feature (1039)..(1039): n is a, c, g, or t
  misc_feature (1043)..(1043): n is a, c, g, or t
  misc_feature (1051)..(1051): n is a, c, g, or t
  misc_feature (1056)..(1056): n is a, c, g, or t
  misc_feature (1065)..(1065): n is a, c, g, or t
  misc_feature (1075)..(1075): n is a, c, g, or t
  misc_feature (1082)..(1082): n is a, c, g, or t
  misc_feature (1091)..(1092): n is a, c, g, or t
  misc_feature (1096)..(1096): n is a, c, g, or t
  misc_feature (1100)..(1100): n is a, c, g, or t
  misc_feature (1111)..(1113): n is a, c, g, or t
  misc_feature (1117)..(1117): n is a, c, g, or t
  misc_feature (1121)..(1121): n is a, c, g, or t
  misc_feature (1128)..(1129): n is a, c, g, or t
  misc_feature (1134)..(1134): n is a, c, g, or t
  misc_feature (1137)..(1137): n is a, c, g, or t
  misc_feature (1145)..(1145): n is a, c, g, or t
  misc_feature (1158)..(1158): n is a, c, g, or t
tagagaaattactatgagaggatcgcatcaccatcaccatcacggatcctatttaggtgacactatagaatcgtcgacccacgcgtccgaggaggatgagcactcggtcaactacaagcccccggcccagaagagcatccaggagatccaggagctggacaaggacgacgagagcctgcgaaagtacaaggaggccctgctgggccgcgtggccgtttccgcagaccccaacgtccccaacgtcgtggtgactggcctgaccctggtgtgcagctcggccccgggccccctggagctggacctgacgggcgacctggagagcttcaagaagcagtcgtttgtgctgaaggagggtgtggagtaccggataaaaatctctttccgggttaaccgagagatagtgtccggcatgaagtacatccagcatacgtacaggaaaggcgtcaagattgacaagactgactacatggtaggcagctatgggccccgggccgaggagtacgagttcctgacccccgtggaggaggcacccaagggtatgctggcccggggcagctacagcatcaagtcccgcttcacagacgacgacaagaccgaccacctgtcctgggagtggaatctcaccatcaagaaggactggaaggactgagcccagccagaggcgggcagggcagactgacggacggacgacggacaggcggatgtgtcccccccagcccctcccctcccataccaaagtgctgacaggcccttccgtgcccctcccaccctggtccgcctccctggcctggctcaancgagtgcctccgacccccctcttaagccttccccaaccaaaggcccagcctccctcggtctcctgtctcgttgctgcttctgcctgtgctgtgggggaaaaaagccccaaccaagccctctgctgcccntttntgngcccccaaggttnttatnttccccgtccncacccgaagnctggntttcaggaagggaacggaaanaacccatttntccaagnccccgtgggtttnccccctgaacntttngcttcttnccttntccccgggntggaaacttnggttgtnggaattccnngccntttngggggccgggnnntttnttcnaaccccnnttttnccnttggccanccccctttttccnttttcg

SEQ ID NO: 282 - DNA, 1053 bp, Homo Sapiens
  misc_feature (1)..(1): n is a, c, g, or t
  misc_feature (775)..(775): n is a, c, g, or t
  misc_feature (778)..(778): n is a, c, g, or t
  misc_feature (793)..(793): n is a, c, g, or t
  misc_feature (827)..(827): n is a, c, g, or t
  misc_feature (835)..(835): n is a, c, g, or t
  misc_feature (847)..(847): n is a, c, g, or t
  misc_feature (866)..(866): n is a, c, g, or t
  misc_feature (868)..(868): n is a, c, g, or t
  misc_feature (922)..(922): n is a, c, g, or t
  misc_feature (926)..(926): n is a, c, g, or t
  misc_feature (944)..(944): n is a, c, g, or t
  misc_feature (949)..(949): n is a, c, g, or t
  misc_feature (959)..(960): n is a, c, g, or t
  misc_feature (965)..(965): n is a, c, g, or t
  misc_feature (975)..(975): n is a, c, g, or t
  misc_feature (986)..(986): n is a, c, g, or t
  misc_feature (998)..(998): n is a, c, g, or t
  misc_feature (1005)..(1005): n is a, c, g, or t
  misc_feature (1007)..(1007): n is a, c, g, or t
  misc_feature (1009)..(1009): n is a, c, g, or t
  misc_feature (1017)..(1017): n is a, c, g, or t
  misc_feature (1019)..(1019): n is a, c, g, or t
  misc_feature (1027)..(1027): n is a, c, g, or t
  misc_feature (1031)..(1031): n is a, c, g, or t
  misc_feature (1036)..(1036): n is a, c, g, or t
  misc_feature (1038)..(1038): n is a, c, g, or t
  misc_feature (1043)..(1043): n is a, c, g, or t
  misc_feature (1046)..(1048): n is a, c, g, or t
  misc_feature (1051)..(1052): n is a, c, g, or t
nattagagagattactatgagaggatcgcatcaccatcaccatcacggatcctatttaggtgacactatagaatcgtcgacccacgcgtccgcccacgcgtccgcggacgcgtgggtgcagccctccagccttctgccgctcgccctctgcctgctggctgcacccgcctccgcgctcgtcaggatcccgctgcacaagttcacgtccatccgccggaccatgtcggaggttgggggctctgtggaggacctgattgccaaaggccccgtctcaaagtactcccaggcggtgccagccgtgaccgaggggcccattcccgaggtgctcaagaactacatggacgcccagtactacggggagattggcatcgggacgcccccccagtgcttcacagtcgtcttcgacacgggctcctccaacctgtgggtcccctccatccactgcaaactgctggacatcgcttgctggatccaccacaagtacaacagcgacaagtccagcacctacgtgaagaatggtacctcgtttgacatccactatggctcgggcagcctctccgggtacctgagccaggacactgtgtcggtgccctgccagtcagcgtcgtcagcctctgccctgggcggtgtcaaagtggagaggcaggtctttggggaggccaccaagcagccaggcatcaccttcatcgcagccaagttcgatggcatcctgggcatggcctacccccgcatctccgtcaacaacgtgctgcccgtcttcgacaacctgatgcancanaagctggtggaccanaacatcttctccttctacctgagcagggacccanatgcgcancctgggggtganctgatgctgggtggcacanantccaagtattacaagggttctctgtcctacctgaatgtcacccgcaaggcctantggnaaggtccacctggaccangtggnaggtggccannggggntgacctgtgnaaggagggttntgaggccattgnggaaaanangnactttccntnatggtggncccngtggnanaaagnggnnnaannt

SEQ ID NO: 283 - DNA, 1017 bp, Homo Sapiens
  misc_feature (3)..(3): n is a, c, g, or t
  misc_feature (574)..(574): n is a, c, g, or t
  misc_feature (724)..(724): n is a, c, g, or t
  misc_feature (762)..(762): n is a, c, g, or t
  misc_feature (787)..(787): n is a, c, g, or t
  misc_feature (815)..(815): n is a, c, g, or t
  misc_feature (830)..(830): n is a, c, g, or t
  misc_feature (844)..(844): n is a, c, g, or t
  misc_feature (867)..(868): n is a, c, g, or t
  misc_feature (872)..(873): n is a, c, g, or t
  misc_feature (875)..(875): n is a, c, g, or t
  misc_feature (881)..(881): n is a, c, g, or t
  misc_feature (887)..(887): n is a, c, g, or t
  misc_feature (889)..(889): n is a, c, g, or t
  misc_feature (891)..(891): n is a, c, g, or t
  misc_feature (893)..(893): n is a, c, g, or t
  misc_feature (902)..(902): n is a, c, g, or t
  misc_feature (920)..(920): n is a, c, g, or t
  misc_feature (926)..(926): n is a, c, g, or t
  misc_feature (929)..(929): n is a, c, g, or t
  misc_feature (934)..(934): n is a, c, g, or t
  misc_feature (937)..(937): n is a, c, g, or t
  misc_feature (946)..(947): n is a, c, g, or t
  misc_feature (952)..(952): n is a, c, g, or t
  misc_feature (966)..(966): n is a, c, g, or t
  misc_feature (968)..(969): n is a, c, g, or t
  misc_feature (974)..(974): n is a, c, g, or t
  misc_feature (996)..(996): n is a, c, g, or t
  misc_feature (1005)..(1005): n is a, c, g, or t
  misc_feature (1008)..(1008): n is a, c, g, or t
gantagagaaattactatgagaggatcgcatcaccatcaccatcacggatcctatttaggtgacactatagaatcgtcgacccacgcgtccggcaaacaaggcccgatcgatgttttcctgtgccctgaggagaccgtaggtgggatcagccctgggaagaccccatcccaggaggtcacttctgaggaggagaacagggccactgactctgccaccatagtgtcaccaccaccatcatctcccccctcatccctcaccacagatcccagccagtctctactcagcctggagcaagaaccgctgttgtcccggatgggcagcctgcgggctcccgtggacgaggaccgcctgtccccgctggtggcggccgactcgctcctggagcatgtgcgggaggacttctccggcctcctccctgaggagttcatcagcctttccccaccccacgaggccctcgactaccacttcggcctcgaggagggcgagggcatcagagacctcttcgactgtgactttggggacctcacccccctggatttctgacagggcttggagggaccagggtttccaganatgctcaccttgtctctgcagccctggagccccctgtccctggccgtcctcccagcctgtttggaaacatttaatttatacccctctcctctgtctccagaagcttctagctctggggtctggctaccgctaggaggctgagcaagccangaagggaaggagtctgtgtggtgtgtatgtgcatgcancctacacccaacgtgtgtaccgggngtgaatgtgtgtgagcatgtgtgtgtgnattgtaccggggaantgaaaggtgaacantaccccctctgtgtgtgcactgnnaaanncnccccantgtgtncncnanggtggtgangcatgaaaatccatggtngcccgnggnggggnctnctaactgcnntttcngcccctttttgttntnnggggntccaacaaaggcccaagggaantgcctgctnccnaaaaactgg

SEQ ID NO: 284 - DNA, 1005 bp, Homo Sapiens
  misc_feature (800)..(800): n is a, c, g, or t
  misc_feature (817)..(817): n is a, c, g, or t
  misc_feature (832)..(832): n is a, c, g, or t
  misc_feature (841)..(841): n is a, c, g, or t
  misc_feature (848)..(848): n is a, c, g, or t
  misc_feature (899)..(899): n is a, c, g, or t
  misc_feature (908)..(908): n is a, c, g, or t
  misc_feature (914)..(914): n is a, c, g, or t
  misc_feature (921)..(921): n is a, c, g, or t
  misc_feature (923)..(923): n is a, c, g, or t
  misc_feature (927)..(927): n is a, c, g, or t
  misc_feature (933)..(933): n is a, c, g, or t
  misc_feature (935)..(935): n is a, c, g, or t
  misc_feature (951)..(951): n is a, c, g, or t
  misc_feature (954)..(954): n is a, c, g, or t
  misc_feature (959)..(959): n is a, c, g, or t
  misc_feature (981)..(981): n is a, c, g, or t
  misc_feature (984)..(985): n is a, c, g, or t
  misc_feature (992)..(992): n is a, c, g, or t
  misc_feature (994)..(994): n is a, c, g, or t
  misc_feature (998)..(998): n is a, c, g, or t
  misc_feature (1002)..(1002): n is a, c, g, or t
  misc_feature (1004)..(1004): n is a, c, g, or t
atagagaaattactatgagaggatcgcatcaccatcaccatcacggatcctatttaggtgacactatagaatcgtcgacccacgcgtccgacaagaatgccgtggagtctgtgcagtatggcgtggccggcagcgcagccttccttgagtgccagccccgctcgccccaagccactgttaagtggctgttccagcgagatcctggtgaccggcgccgagagattcgtgcagaggaccgcttcctgcgcacagagcagggcttgttgctccgtgcactgcagctcagcgatcgtggcctctactcctgcacagccactgagaacaactttaagcacgtcgtcacacgagtgcagctgcatgtactgggccgggacgccgtccatgctgccctcttcccaccactgtccatgagcgccccgccacccccaggcgcaggccccccaacgcctccttaccaggagttagcccagctgctggcccagccagaagtgggcctcatccaccagtactgccagggttactggcgccatgtgccccccagccccagggaggctccaggggcaccccggtctcctgagccccaggaccagaaaaagccccggaaccgccggcaccaccctccggacacatgaggccagctgcctgtgcctgccatgggccagcctagcccttgtcccttttaatataaaagatatatatatatatatatatatatataaaatatctatattctatacacaccctgcccctgcaaagacagtatttattggtgggttgaatatagcctgcctcagtggcancatcctccaaaacttanacccatgctggtcanaaacggcanaaaacanagcctgcctaaccaggcccagccagttggtggggccaggccaggaccacanagtccccanactcanctggaantntacntgctgnanagcctccgccaaaatntanagganaaagggagggaacaagccctantcnnatggggnanggantgtncnc

SEQ ID NO: 285 - DNA, 1179 bp, Homo Sapiens
  misc_feature (1)..(1): n is a, c, g, or t
  misc_feature (947)..(947): n is a, c, g, or t
  misc_feature (961)..(962): n is a, c, g, or t
  misc_feature (985)..(985): n is a, c, g, or t
  misc_feature (987)..(987): n is a, c, g, or t
  misc_feature (1002)..(1002): n is a, c, g, or t
  misc_feature (1019)..(1019): n is a, c, g, or t
  misc_feature (1025)..(1025): n is a, c, g, or t
  misc_feature (1027)..(1027): n is a, c, g, or t
  misc_feature (1032)..(1032): n is a, c, g, or t
  misc_feature (1044)..(1044): n is a, c, g, or t
  misc_feature (1085)..(1085): n is a, c, g, or t
  misc_feature (1087)..(1088): n is a, c, g, or t
  misc_feature (1097)..(1097): n is a, c, g, or t
  misc_feature (1103)..(1103): n is a, c, g, or t
  misc_feature (1107)..(1107): n is a, c, g, or t
  misc_feature (1109)..(1109): n is a, c, g, or t
  misc_feature (1112)..(1112): n is a, c, g, or t
  misc_feature (1114)..(1114): n is a, c, g, or t
  misc_feature (1121)..(1121): n is a, c, g, or t
  misc_feature (1139)..(1139): n is a, c, g, or t
  misc_feature (1150)..(1151): n is a, c, g, or t
  misc_feature (1153)..(1153): n is a, c, g, or t
  misc_feature (1163)..(1163): n is a, c, g, or t
  misc_feature (1171)..(1171): n is a, c, g, or t
naattagagaaattactatgagaggatcgcatcaccatcaccatcacggatcctatttaggtgacactatagaatcgtcgacccacgcgtccggtaggaccagggggcagttcaatgccttttcctatcatttccgaggcagacggtctcttgagttcagctaccaggaggacaagccgaccaagaaaacaagaccacggaaaatacccagtgttgggagacagggggaacatctcagcaacagcacctcagccttcagcacacgctcagatgcatctgggacaaatgacttcagagagtttgttctggaaatgcagaagaccatcacagacctcagaacacagataaagaaacttgaatcacggctcagtaccacagagtgcgtggatgccgggggcgaatctcacgccaacaacaccaagtggaaaaaagatgcatgcaccatttgtgaatgcaaagacgggcaggtcacctgcttcgtggaagcttgcccccctgccacctgtgctgtccccgtgaacatcccaggggcctgctgtccagtctgcttacagaagagggcggaggaaaagccctaggctcctgggaggctcctcagagtttgtctgctgtgccatcgtgagatcgggtggccgatggcagggagctgcggactgcagaccaggaaacacccagaactcgtgacatttcatgacaacgtccagctggtgctgttacagaaggcagtgcaggaggcttccaaccagagcatctgcggagaaggaggcacagcaggtgcctgaagggaagcaggcaggagtcctagcttcacgttagacttctcaggtttttatttaattcttttaaaatgaaaaattggtgctactattaaattgcacagttgaatcatttaggcgcctaaattggttttgcctcccaacaccattttctttttaataaagcagganacctctatatgtcnnccttgccttgttcaaatgccagnanccggcaaacctgtcncccgcaggtggggtgantctcgnanctgcnaaggggctcccnaaatcggggttcctccaagctttgttttaaaaaaaaattgngnnttgggaaanggaaanaaancnttngngaaaagngttccaagggaacttgtntgggggggaanngnaaaccccggnccttttcntgggaacc

SEQ ID NO: 286 - DNA, 1169 bp, Homo Sapiens
  misc_feature (814)..(814): n is a, c, g, or t
  misc_feature (835)..(835): n is a, c, g, or t
  misc_feature (840)..(840): n is a, c, g, or t
  misc_feature (846)..(846): n is a, c, g, or t
  misc_feature (877)..(877): n is a, c, g, or t
  misc_feature (879)..(879): n is a, c, g, or t
  misc_feature (891)..(891): n is a, c, g, or t
  misc_feature (907)..(907): n is a, c, g, or t
  misc_feature (937)..(937): n is a, c, g, or t
  misc_feature (958)..(958): n is a, c, g, or t
  misc_feature (961)..(961): n is a, c, g, or t
  misc_feature (967)..(967): n is a, c, g, or t
  misc_feature (969)..(971): n is a, c, g, or t
  misc_feature (1001)..(1003): n is a, c, g, or t
  misc_feature (1008)..(1009): n is a, c, g, or t
  misc_feature (1029)..(1029): n is a, c, g, or t
  misc_feature (1040)..(1040): n is a, c, g, or t
  misc_feature (1056)..(1057): n is a, c, g, or t
  misc_feature (1060)..(1061): n is a, c, g, or t
  misc_feature (1069)..(1069): n is a, c, g, or t
  misc_feature (1089)..(1089): n is a, c, g, or t
  misc_feature (1094)..(1094): n is a, c, g, or t
  misc_feature (1105)..(1106): n is a, c, g, or t
  misc_feature (1113)..(1113): n is a, c, g, or t
  misc_feature (1117)..(1117): n is a, c, g, or t
  misc_feature (1120)..(1121): n is a, c, g, or t
  misc_feature (1142)..(1142): n is a, c, g, or t
  misc_feature (1146)..(1146): n is a, c, g, or t
  misc_feature (1149)..(1149): n is a, c, g, or t
gaattagagaaattactatgagaggatcgcatcaccatcaccatcacggatcctatttaggtgacactatagaatcgtcgacccacgcgtccgaccggctgctttgccaccatctggctggcggcgactcgcggcagccggttggtgaagcgcgaatacctgagggtgaatgtggtgaaaacctgcgaggaaatcctcaattacgtgctggtacgagtgcaacccccgcagcccggcctgccgcggccccgcttctccctctatctctcagcccaacttcagatcggtgtgatccgcgtctattctcaacaatgccagtacctcgtggaggacatccagcacatcttggagcgcctccaccgtgcccagctgcagatccgaatagatatggagactgagctacccagcctgctgcttcctaaccacctggccatgatggagaccctagaagatgctccagatcccttttttgggatgatgtctgtggatcccagacttcctagtcctttcgatatccctcagattcgacacctcttagaggctgcaatcccagagagagttgaagagatccctcctgaagttcctacagagcccagggagccagagaggattccggtcactgtgctgccacctgaggccatcacgatcctggaggcagagcccatacggatgctggagattgagggtgaacgggagctcccagaggtcagccgccgagaactggacctgctgatcgcagaggaagaagaagctatcttgttagaaatcccgcggctcccacctccagctcctgcagaggtggaaggaatagganaggcactggggtcctgagganctgangctganaggctgggaacctggggccctactcatggangngaccccccggangaactgcgtctgccanccccacccagcccaaaaaggaaggccccanttccccccaacttcttcgcgncgncggttntnnncgggttactgtttctgggaaaaaggaaaannnaaatnncccccggaaaaaattccagnaaaaaaactgncaaaccaaaaaccccnntgnntgggaaangtccccatgggggaaacccnccccnaaaaagaaacnnccaaaangccntgnnggaaattttttcaaaaacccnaaanttnttctggggggggtaaccccc

SEQ ID NO: 287 - DNA, 1200 bp, Homo Sapiens
  misc_feature (867)..(867): n is a, c, g, or t
  misc_feature (902)..(902): n is a, c, g, or t
  misc_feature (915)..(915): n is a, c, g, or t
  misc_feature (932)..(932): n is a, c, g, or t
  misc_feature (950)..(950): n is a, c, g, or t
  misc_feature (952)..(952): n is a, c, g, or t
  misc_feature (955)..(955): n is a, c, g, or t
  misc_feature (968)..(968): n is a, c, g, or t
  misc_feature (971)..(971): n is a, c, g, or t
  misc_feature (975)..(975): n is a, c, g, or t
  misc_feature (979)..(979): n is a, c, g, or t
  misc_feature (1017)..(1017): n is a, c, g, or t
  misc_feature (1033)..(1033): n is a, c, g, or t
  misc_feature (1038)..(1038): n is a, c, g, or t
  misc_feature (1041)..(1041): n is a, c, g, or t
  misc_feature (1046)..(1046): n is a, c, g, or t
  misc_feature (1063)..(1063): n is a, c, g, or t
  misc_feature (1088)..(1088): n is a, c, g, or t
  misc_feature (1092)..(1092): n is a, c, g, or t
  misc_feature (1094)..(1094): n is a, c, g, or t
  misc_feature (1099)..(1099): n is a, c, g, or t
  misc_feature (1102)..(1102): n is a, c, g, or t
  misc_feature (1112)..(1112): n is a, c, g, or t
  misc_feature (1115)..(1115): n is a, c, g, or t
  misc_feature (1118)..(1118): n is a, c, g, or t
  misc_feature (1126)..(1127): n is a, c, g, or t
  misc_feature (1129)..(1129): n is a, c, g, or t
  misc_feature (1133)..(1133): n is a, c, g, or t
  misc_feature (1148)..(1148): n is a, c, g, or t
  misc_feature (1151)..(1151): n is a, c, g, or t
  misc_feature (1162)..(1162): n is a, c, g, or t
  misc_feature (1164)..(1164): n is a, c, g, or t
  misc_feature (1177)..(1177): n is a, c, g, or t
  misc_feature (1180)..(1180): n is a, c, g, or t
  misc_feature (1183)..(1183): n is a, c, g, or t
  misc_feature (1189)..(1189): n is a, c, g, or t
  misc_feature (1191)..(1191): n is a, c, g, or t
  misc_feature (1193)..(1193): n is a, c, g, or t
agagaaattactatgagaggatcgcatcaccatcaccatcacggatcctatttaggtgacactatagaatcgtcgacccacgcgtccggcgccacctgcctcattgtgcccaggagttctccaaacccgcgctgcggagtgagtgaccaagttccggccagttcgacctcgaggatccagaggtggagacggtactacctcccagctctgttttccatccccttcaggtccttcctcgggaggcggcgaaggcggtccaccctgcgcgtgatccttcatgcccggcccctgcccctccctccgggtggaacttccccctcaccgccagacttaagctgaggatcgttggatctctggcggggtgcagaactgagcccaggccacagtaccctattcacgctctgtgcttgtgccaagggggcaatggcggcttcctgtgttctactgcacactgggcagaagatgcctctgattggtctgggtacctggaagagtgagcctggtcaggtaaaagcagctgttaagtatgcccttagcgtaggctaccgccacattgattgtgctgctatctacggcaatgagcctgagattggggaggccctgaaggaggacgtgggaccaggcaaggcggtgcctcgggaggagctgtttgtgacatccaagctgtggaacaccaagcaccaccccgaggatgtggagcctgccctccggaagactctggctgacctccagctggagtatctggacctgtacctgatgcactggccttatgcctttgagcggggagacaaccccttccccaagaatgctgatgggactatatgctacgactccacccactacaaggagacttggaaggctctggangcactggtggctaaggggcttggtgcaaggcgctngggcctgtccaantttcaacagtcgggcanaatgataaaatactcagngnggncctccgtgcgtcnagntgtnttgnaaggggaaatgccccccatactttggctcaaaaatganctaaattgccccctgncaaancangtggncctggaagtaaactgcnttaaaacccctttggggctcccctnaatncnggcanggngggatcctgnaanaancctgtccnngntggnaagaaacaaataaantcntggcaattggntnaaaaaaaaatggnccnaantttccncntnaaaattt

SEQ ID NO: 288 - DNA, 1049 bp, Homo Sapiens
  misc_feature (1)..(1): n is a, c, g, or t
  misc_feature (873)..(873): n is a, c, g, or t
  misc_feature (878)..(878): n is a, c, g, or t
  misc_feature (898)..(898): n is a, c, g, or t
  misc_feature (907)..(907): n is a, c, g, or t
  misc_feature (921)..(921): n is a, c, g, or t
  misc_feature (924)..(924): n is a, c, g, or t
  misc_feature (963)..(963): n is a, c, g, or t
  misc_feature (969)..(969): n is a, c, g, or t
  misc_feature (984)..(984): n is a, c, g, or t
  misc_feature (987)..(987): n is a, c, g, or t
  misc_feature (992)..(992): n is a, c, g, or t
  misc_feature (996)..(996): n is a, c, g, or t
  misc_feature (1000)..(1000): n is a, c, g, or t
  misc_feature (1014)..(1014): n is a, c, g, or t
  misc_feature (1017)..(1020): n is a, c, g, or t
  misc_feature (1023)..(1023): n is a, c, g, or t
  misc_feature (1025)..(1025): n is a, c, g, or t
  misc_feature (1028)..(1028): n is a, c, g, or t
  misc_feature (1030)..(1030): n is a, c, g, or t
  misc_feature (1034)..(1034): n is a, c, g, or t
  misc_feature (1038)..(1038): n is a, c, g, or t
  misc_feature (1040)..(1040): n is a, c, g, or t
naattagagagaattactatgagaggatcgcatcaccatcaccatcacggatcctatttaggtgacactatagaatcgtcgacccacgcgtccgccggcggtgacaacggcaacatggccctgaacggagctgaagtcgacgacttctcctgggagcccccgactgaggcggagacgaaggtgctgcaggcgcgacgggagcggcaagatcgcatctcccggctcatgggcgactatctgctgcgcggttaccgcatgctgggcgagacgtgtgcggactgcgggacgatcctcctccaagacaaacagcggaaaatctactgcgtggcttgtcaggaactcgactcagacgtggataaagataatcccgctctgaatgcccaggctgccctctcccaagctcgggagcaccagctggcctcagcctcagagctccccctgggctctcgacctgcgccccagcccccagtacctcgtccggagcactgtgagggagctgcagcaggactcaaggcagcccaggggccacctgctcctgctgtgcctccaaatacagatgtcatggcctgcacacagacagccctcttgcagaagctgacctgggcctctgctgaactgggctctagcacctccctggagactagcatccagctgtgtggccttatccgcgcatgtgcggaggccctgcgcagcctgcagcagctacagcactaagagaagcccctgagaaaaaccctctagaaaaacagctgttcctctgtgtggtttgtttttttcctggttccaagtgtgcatgccagccccagctccactcacctttttccagcttttggcctcttcacctctccactctgttctccttgacgccctganatganttgagcttgtttcttctcantttccccantcaggatgagggantangtaaaggactatgtgatgcccctttttctaaggaaaaanccatancctttttcaaagtancanccaangggnggancctaaccttgtttntgnnnnacntntgnancctnttcncntttggggtc

SEQ ID NO: 289 - DNA, 1135 bp, Homo Sapiens
  misc_feature (764)..(764): n is a, c, g, or t
  misc_feature (784)..(784): n is a, c, g, or t
  misc_feature (807)..(807): n is a, c, g, or t
  misc_feature (838)..(838): n is a, c, g, or t
  misc_feature (843)..(843): n is a, c, g, or t
  misc_feature (847)..(847): n is a, c, g, or t
  misc_feature (869)..(869): n is a, c, g, or t
  misc_feature (885)..(885): n is a, c, g, or t
  misc_feature (890)..(890): n is a, c, g, or t
  misc_feature (932)..(932): n is a, c, g, or t
  misc_feature (937)..(937): n is a, c, g, or t
  misc_feature (942)..(942): n is a, c, g, or t
  misc_feature (965)..(965): n is a, c, g, or t
  misc_feature (968)..(968): n is a, c, g, or t
  misc_feature (972)..(972): n is a, c, g, or t
  misc_feature (974)..(974): n is a, c, g, or t
  misc_feature (980)..(980): n is a, c, g, or t
  misc_feature (1021)..(1021): n is a, c, g, or t
  misc_feature (1023)..(1023): n is a, c, g, or t
  misc_feature (1027)..(1027): n is a, c, g, or t
  misc_feature (1037)..(1037): n is a, c, g, or t
  misc_feature (1058)..(1058): n is a, c, g, or t
  misc_feature (1066)..(1066): n is a, c, g, or t
  misc_feature (1071)..(1071): n is a, c, g, or t
  misc_feature (1093)..(1093): n is a, c, g, or t
  misc_feature (1112)..(1112): n is a, c, g, or t
  misc_feature (1116)..(1116): n is a, c, g, or t
  misc_feature (1118)..(1118): n is a, c, g, or t
  misc_feature (1120)..(1121): n is a, c, g, or t
  misc_feature (1125)..(1126): n is a, c, g, or t
  misc_feature (1129)..(1129): n is a, c, g, or t
  misc_feature (1133)..(1133): n is a, c, g, or t
agaaattactatgagaggatcgcatcaccatcaccatcacggatcctatttaggtgacactatagaatcgtcgacccacgcgtccggccacattaaccggcaggatgtcggaggtgcggctgccaccgctacgcgccctggacgactttgttctggggtcggcgcgtctggcggctccggatccatgcgacccgcagcgatggtgccaccgcgtcatcaacaacctcctctactaccaaaccaactaccttctctgcttcggcatcggcctcgctctcgccgggtacgtgcggccacttcatacgctcctgagcgcgctggtagtggcggtggccctcggcgtgctggtgtgggcagctgagacccgcgcagctgtgcgccgctgccgccgcagccaccctgcagcctgcctggccgcagtgcttgccgtcggcctcctggtgctctgggtcgcgggcggcgcttgcaccttcctgttcagcatcgccgggccggtgcttctgatcctggtgcacgcctcgttgcgcctgcgcaaccttaagaacaagattgagaacaagatcgagagcattggtctcaagcggacgccaatgggcctgctactagaggcactgggacaagagcaggaggctggatcctaggcccctgggatctgtacccaggacctggagaataccaccccacccccagcccataattgggacccagagccctttcccagcacttaaaacaggagcctagagccccctgcccaaacaaaacangacatctgtgaccgccctanccccacgccagccccaaactaanatatccctcacacccagcccccattacctanggacnagantcttccccagccttgaacctangacaaaaaccacctanatcanccccaaaactggggcttcaggccaaaacatcatggccaattnaaatngtganccaaaaaactcccatcaaccttntcnatgntnatcccnaaatggggcctggaacaaggactctcaaatcttgaacctgnanaaancttttcaaanccacctactttcaaccaagtnaaaaattnccaantttgaatcaaaaccaatgttcnatgccctgggggaaggaancggnancnnaaanntgnaccngg

SEQ ID NO: 290 - DNA, 1001 bp, Homo Sapiens
  misc_feature (860)..(860): n is a, c, g, or t
  misc_feature (891)..(891): n is a, c, g, or t
  misc_feature (921)..(921): n is a, c, g, or t
  misc_feature (933)..(933): n is a, c, g, or t
  misc_feature (952)..(952): n is a, c, g, or t
  misc_feature (965)..(965): n is a, c, g, or t
  misc_feature (967)..(967): n is a, c, g, or t
  misc_feature (972)..(972): n is a, c, g, or t
aatagagaaattaactatgagaggatcgcatcaccatcaccatcacggatcctatttaggtgacactatagaatcgtcgacccacgcgtccgggaccccggtggcggggcccacaggccgcgaccttttcgccgaagggctgctggagttcctgcgacccgctgtgcagcagctcgactctcacgtacacgccgtcagagagagccaggtagagctccgggaacaaattgacaacctagccacagaactgtgccgcataaatgaggatcagaaggtggccctggatcttgacccctatgttaagaagctacttaatgcccggcgacgcgttgtcttggttaacaacattctacagaatgctcaggaacgactgagacggctaaaccacagtgttgccaaggaaacagcccgcaggagagcaatgctggattcgggaatttacccccctggctccccaggcaaataacagatgagcctatggactcagtagcacaagtactgttccccagctgccttgtttcaacagacatgcaaagatcctaggagacagtccccatagaccttcagacattaaaaagggagccgtacagtttgtttgaagcacttcgtcttacccatttatgtaggggccccaggaaacctacacacagccagaatgaggttcccaaaggacttacattaattatggctcttgcttcctttcacaaatgagctgaggcctctacttttttttttaagctgcatacgtgaggcttaccttcttcaggactagttaaaccagaggggcttcctttgtatgttacatgcctggttacatggggcctggacagcatgtcctctacctgtgacttctcattttncctgtttacactggggaattggagggggcangcaaagtcaaagtgaatgaccttctgtccncccctttttttnttgcactggcttgaatacntacccatgttgananaatcnttttatttcaataaaataacttaaaaatg

SEQ ID NO: 291 - DNA, 1253 bp, Homo Sapiens
  misc_feature (2)..(2): n is a, c, g, or t
  misc_feature (869)..(869): n is a, c, g, or t
  misc_feature (894)..(894): n is a, c, g, or t
  misc_feature (919)..(919): n is a, c, g, or t
  misc_feature (949)..(949): n is a, c, g, or t
  misc_feature (954)..(954): n is a, c, g, or t
  misc_feature (1020)..(1020): n is a, c, g, or t
  misc_feature (1022)..(1022): n is a, c, g, or t
  misc_feature (1024)..(1024): n is a, c, g, or t
  misc_feature (1048)..(1048): n is a, c, g, or t
  misc_feature (1052)..(1052): n is a, c, g, or t
  misc_feature (1060)..(1060): n is a, c, g, or t
  misc_feature (1071)..(1071): n is a, c, g, or t
  misc_feature (1073)..(1073): n is a, c, g, or t
  misc_feature (1083)..(1083): n is a, c, g, or t
  misc_feature (1090)..(1090): n is a, c, g, or t
  misc_feature (1092)..(1092): n is a, c, g, or t
  misc_feature (1099)..(1099): n is a, c, g, or t
  misc_feature (1103)..(1103): n is a, c, g, or t
  misc_feature (1110)..(1111): n is a, c, g, or t
  misc_feature (1122)..(1124): n is a, c, g, or t
  misc_feature (1126)..(1126): n is a, c, g, or t
  misc_feature (1137)..(1137): n is a, c, g, or t
  misc_feature (1141)..(1141): n is a, c, g, or t
  misc_feature (1150)..(1150): n is a, c, g, or t
  misc_feature (1156)..(1156): n is a, c, g, or t
  misc_feature (1163)..(1163): n is a, c, g, or t
  misc_feature (1167)..(1167): n is a, c, g, or t
  misc_feature (1177)..(1177): n is a, c, g, or t
  misc_feature (1189)..(1189): n is a, c, g, or t
  misc_feature (1193)..(1193): n is a, c, g, or t
  misc_feature (1199)..(1199): n is a, c, g, or t
  misc_feature (1202)..(1202): n is a, c, g, or t
  misc_feature (1204)..(1205): n is a, c, g, or t
  misc_feature (1215)..(1215): n is a, c, g, or t
  misc_feature (1222)..(1222): n is a, c, g, or t
  misc_feature (1238)..(1238): n is a, c, g, or t
  misc_feature (1252)..(1252): n is a, c, g, or t
cnatagagagattactatgagaggatcgcatcaccatcaccatcacggatcctatttaggtgacactatagaatcgtcgacccacgcgtccgggtgcccgacatggcgagtgtagtgctgccgagcggatcccagtgtgcggcggcagcggcggcggcggcgcctcccgggctccggctccggcttctgctgttgctcttctccgccgcggcactgatccccacaggtgatgggcagaatctgtttacgaaagacgtgacagtgatcgagggagaggttgcgaccatcagttgccaagtcaataagagtgacgactctgtgattcagctactgaatcccaacaggcagaccatttatttcagggacttcaggcctttgaaggacagcaggtttcagttgctgaatttttctagcagtgaactcaaagtatcattgacaaacgtctcaatttctgatgaaggaagatacttttgccagctctataccgatcccccacaggaaagttacaccaccatcacagtcctggtcccaccacgtaatctgatgatcgatatccagaaagacactgcggtggaaggtgaggagattgaagtcaactgcactgctatggccagcaagccagccacgactatcaggtggttcaaagggaacacagagctaaaaggcaaatcggaggtggaagagtggtcagacatgtacactgtgaccagtcagctgatgctgaaggtgcacaaggaggacgatggggtcccagtgatctgccaggtggagcaccctgcggtcactggaaacctgcagacccagcggtatctagaagtacagtataagcctcaagtgcacattcagatgacttatcctctacaaggctnaacccgggaaggggacgcgcttganttaacatgtgaaagccatcgggaancccccagcctgtgatggtaacttgggtganagtcnatgatgaaatgcctcaacaccccgtactgtctgggcccaacctgttcatcaataacctaaacaaanananaatggtacataccgctgggaaacnttcnaaacaaanggggaaaagcncnccccgaatanaagctgnangtaaacnaacnaacgggnnaaaaaaaaacnnnanttcccggcctnactnattgcccanttcccnaaaaaangaangggagacctnccaaatcccaanaggnaaaagnccnannggcaaggaanattcccnaaccggggccccgggngggggggttccccng

SEQ ID NO: 292 - DNA, 1122 bp, Homo Sapiens
  misc_feature (829)..(829): n is a, c, g, or t
  misc_feature (832)..(832): n is a, c, g, or t
  misc_feature (869)..(869): n is a, c, g, or t
  misc_feature (872)..(872): n is a, c, g, or t
  misc_feature (893)..(893): n is a, c, g, or t
  misc_feature (904)..(904): n is a, c, g, or t
  misc_feature (914)..(914): n is a, c, g, or t
  misc_feature (925)..(925): n is a, c, g, or t
  misc_feature (928)..(928): n is a, c, g, or t
  misc_feature (954)..(954): n is a, c, g, or t
  misc_feature (968)..(968): n is a, c, g, or t
  misc_feature (982)..(982): n is a, c, g, or t
  misc_feature (988)..(988): n is a, c, g, or t
  misc_feature (992)..(992): n is a, c, g, or t
  misc_feature (996)..(996): n is a, c, g, or t
  misc_feature (1000)..(1001): n is a, c, g, or t
  misc_feature (1008)..(1008): n is a, c, g, or t
  misc_feature (1029)..(1029): n is a, c, g, or t
  misc_feature (1033)..(1033): n is a, c, g, or t
  misc_feature (1036)..(1036): n is a, c, g, or t
  misc_feature (1041)..(1041): n is a, c, g, or t
  misc_feature (1051)..(1051): n is a, c, g, or t
  misc_feature (1053)..(1053): n is a, c, g, or t
  misc_feature (1055)..(1055): n is a, c, g, or t
  misc_feature (1065)..(1065): n is a, c, g, or t
  misc_feature (1068)..(1068): n is a, c, g, or t
  misc_feature (1071)..(1071): n is a, c, g, or t
  misc_feature (1074)..(1074): n is a, c, g, or t
  misc_feature (1079)..(1080): n is a, c, g, or t
  misc_feature (1084)..(1084): n is a, c, g, or t
  misc_feature (1095)..(1095): n is a, c, g, or t
  misc_feature (1097)..(1097): n is a, c, g, or t
  misc_feature (1102)..(1102): n is a, c, g, or t
  misc_feature (1113)..(1113): n is a, c, g, or t
  misc_feature (1120)..(1121): n is a, c, g, or t
tagagaaattactatgagaggatcgcatcaccatcaccatcacggatcctatttaggtgacactatagaatcgtcgacccacgcgtccggcgcagatgtgacgctgcgcagccgctggaccaacatgaacgcgcttcactacgcggcctattttgatgtgcccgacctcgtgcgtgtgctgctgaagggtgcgaggccgcgagtggtgaactccacgtgcagtgacttcaaccacggctcagccctgcacatcgctgcttccagcctgtgcctgggcgccgccaaatgtttgctggagcacggcgccaaccctgcgctgaggaatcgaaaaggacaggtgccggcggaggtggtcccagatcctatggacatgtccctggacaaggcagaggcggcactggtggccaaggagctgcggacgcttctggaagaggcagtgccactatcttgcgccctccccaaggtcacgctacccaactatgacaacgtcccaggcaatctcatgcttagcgcactgggcttgcgcctgggagaccgcgtgctgctggatggccagaagacgggcacactgcggttctgtgggaccacggagtttgccagcggccagtgggtgggcgtggagctggacgaacctgagggcaagaacgatggcagcgttgggggcgttcggtacttcatctgccctcccaagcagggtctctttgcctccgtgtccaagatctccaaggcagtggacgcacccccctcctctgtcacctccacaccccggaccccccggatggacttctcccgtgtcaccggcaaaggccgcagggaacacaaaggcaanaanaagaccccatcatccccatctctgggcagctttgcancancgtgacggggccaaggctgangttggaaacangtccttgtcncgggccaaaancangggatcgtgcgcttctacgggaaaanaaactttgccccangttactggtatggnattganctgnacancccnnaggcaancatgatggctctgtcttcggngtcnggnatttncttgcccccnangnatggggtctnccnacnacntcccnnattnaaagaattggngnatccnttgattccccngggaaanng

SEQ ID NO: 293 - DNA, 1173 bp, Homo Sapiens
  misc_feature (858)..(858): n is a, c, g, or t
  misc_feature (868)..(868): n is a, c, g, or t
  misc_feature (913)..(913): n is a, c, g, or t
  misc_feature (934)..(934): n is a, c, g, or t
  misc_feature (954)..(954): n is a, c, g, or t
  misc_feature (959)..(959): n is a, c, g, or t
  misc_feature (966)..(966): n is a, c, g, or t
  misc_feature (975)..(975): n is a, c, g, or t
  misc_feature (1007)..(1007): n is a, c, g, or t
  misc_feature (1013)..(1013): n is a, c, g, or t
  misc_feature (1022)..(1022): n is a, c, g, or t
  misc_feature (1068)..(1068): n is a, c, g, or t
  misc_feature (1073)..(1073): n is a, c, g, or t
  misc_feature (1082)..(1082): n is a, c, g, or t
  misc_feature (1088)..(1088): n is a, c, g, or t
  misc_feature (1091)..(1091): n is a, c, g, or t
  misc_feature (1096)..(1096): n is a, c, g, or t
  misc_feature (1106)..(1106): n is a, c, g, or t
  misc_feature (1114)..(1114): n is a, c, g, or t
  misc_feature (1118)..(1118): n is a, c, g, or t
  misc_feature (1125)..(1126): n is a, c, g, or t
  misc_feature (1129)..(1129): n is a, c, g, or t
  misc_feature (1132)..(1132): n is a, c, g, or t
  misc_feature (1139)..(1139): n is a, c, g, or t
  misc_feature (1143)..(1143): n is a, c, g, or t
  misc_feature (1146)..(1146): n is a, c, g, or t
  misc_feature (1149)..(1149): n is a, c, g, or t
  misc_feature (1152)..(1152): n is a, c, g, or t
  misc_feature (1156)..(1156): n is a, c, g, or t
  misc_feature (1172)..(1172): n is a, c, g, or t
agagaaattactatgagaggatcgcatcaccatcaccatcacggatcctatttaggtgacactatagaatcgtcgacccacgcgtccgcggacgcgtgggctgggacttacgagtgcagggccagcaacgaccccaagaggaatgacttgaggcaaaacccctccataacatggattcgagcccaggccaccataagcgtccttcagaagccaaggattgtcaccagtgaagaggtcattattcgagacagccctgttctccctgtcaccctgcagtgtaacctcacctccagctctcacacccttacatacagctactggacaaagaatggggtggaactgagtgccactcgtaagaatgccagcaacatggagtacaggatcaataagccgagagctgaggattcaggcgaataccactgcgtatatcactttgtcagcgctcctaaagcaaacgccaccattgaagtgaaagccgctcctgacatcactggccataaacggagtgagaacaagaatgaagggcaggatgccactatgtattgcaagtcagttggctacccccacccagactggatatggcgcaagaaggagaacgggatgcccatggacattgtcaatacctctggccgcttcttcatcatcaacaaggaaaattacactgagttgaacattgtgaacctgcagatcacggaagaccctggcgagtatgaatgtaatgccaccaacgccattggctccgcctctgttgtcactgtcctcagggtgcggagccacctggccccactctggcctttcttgggaattctggctgaaattatcatccttgtggtgatcattgttgtgtatgaaaaaagnaaaaggccanatgaggttcctgacgatgatgaaccagctggacaatgaaaaaccnactctaccaacaatcacaaanataaaaacttgcgcccaaanaaacncaaattnaagtactgntttacaatatctttaggttcctgaaactgggnggcaanatgacctgnctaaaattttttggcttggaacctctttgggttctccccccctttncaagngggccaacnccccantgnactgntctaaaggcntggccttntttnacccccnnccnggnaaggggngatntanccnggntaantttttaacaatgcttnc

SEQ ID NO: 294 - DNA, 707 bp, Homo Sapiens
  misc_feature (4)..(4): n is a, c, g, or t
  misc_feature (12)..(12): n is a, c, g, or t
aganttagaggnaattactatgagaggatcgcatcaccatcaccatcacggatcctatttaggtgacactatagaatcgtcgacccacgcgtccgcaaagataaaatacagacagactactcaggatgcccctgaagaggttcgtaaccgtgacttcaggagagagttggaagaaagagagagagctgctgcaagagagaaaaatagggatcgtccaacccgagaacatacaacctcctcttcagtgtcaaaaaagccacggttagaccagattcctgccgccaaccttgatgcagatgaccctctaacagatgaggaagatgaagattttgaagaagaaagtgatgatgatgatactgcagctcttcttgcagaactggaaaaaattaaaaaagaaagagctgaagagcaggccaggaaggaacaagaacaaaaagctgaagaagagaggattcgtatggaaaacattctgagcggaaaccctctccttaatctcactggcccatcccagcctcaggccaacttcaaagttaaaagaaggtgggatgatgacgttgtcttcaagaactgtgcaaaaggtgtagatgaccagaagaaagacaaaagatttgtaaatgacacactgcgatctgaatttcacaaaaagttcatggagaaatatattaaatagtacagttttatgtgcttaattaaagactgtaaaacgt

SEQ ID NO: 295 - DNA, 1117 bp, Homo Sapiens
  misc_feature (1)..(1): n is a, c, g, or t
  misc_feature (700)..(700): n is a, c, g, or t
  misc_feature (817)..(817): n is a, c, g, or t
  misc_feature (870)..(870): n is a, c, g, or t
  misc_feature (876)..(876): n is a, c, g, or t
  misc_feature (892)..(893): n is a, c, g, or t
  misc_feature (908)..(908): n is a, c, g, or t
  misc_feature (911)..(911): n is a, c, g, or t
  misc_feature (913)..(913): n is a, c, g, or t
  misc_feature (918)..(919): n is a, c, g, or t
  misc_feature (929)..(929): n is a, c, g, or t
  misc_feature (933)..(934): n is a, c, g, or t
  misc_feature (937)..(937): n is a, c, g, or t
  misc_feature (940)..(940): n is a, c, g, or t
  misc_feature (944)..(945): n is a, c, g, or t
  misc_feature (955)..(955): n is a, c, g, or t
  misc_feature (957)..(957): n is a, c, g, or t
  misc_feature (968)..(968): n is a, c, g, or t
  misc_feature (987)..(987): n is a, c, g, or t
  misc_feature (989)..(989): n is a, c, g, or t
  misc_feature (999)..(999): n is a, c, g, or t
  misc_feature (1004)..(1004): n is a, c, g, or t
  misc_feature (1013)..(1013): n is a, c, g, or t
  misc_feature (1017)..(1017): n is a, c, g, or t
  misc_feature (1029)..(1029): n is a, c, g, or t
  misc_feature (1063)..(1063): n is a, c, g, or t
  misc_feature (1067)..(1067): n is a, c, g, or t
  misc_feature (1077)..(1077): n is a, c, g, or t
  misc_feature (1090)..(1090): n is a, c, g, or t
  misc_feature (1093)..(1093): n is a, c, g, or t
  misc_feature (1098)..(1098): n is a, c, g, or t
  misc_feature (1113)..(1113): n is a, c, g, or t
ngatagagagaattactatgagaggatcgcatcaccatcaccatcacggatcctatttaggtgacactatagaatcgtcgacccacgcgtccgtctccttagtggaagagaaagccaatacccacctcctcttgggcatgtgcttagacgcctgtgctcgctaccttctgttctccaagcagccgtcacaggcacaaaggatgtatgaaaaagctctgcagatttctgaagaaatacaaggagaaagacacccacagaccattgtgctgatgagtgacctggctactaccctggatgcacagggccgctttgatgaggcctatatttatatgcaaagggcatcagatctggcaagacagataaatcatcctgagctacacatggtactcagtaatctagctgcagttttgatgcacagagaacgatatacacaagcaaaagagatctaccaggaagcactgaagcaggcaaagctgaaaaaagatgaaatttctgtacaacacatcagggaagagttggctgagctgtcaaagaaaagtagacctttgacaaattctgtcaagctctaaatccatttttgtgtagggagaataatgtctagtaatgtggaagaatagctatcattcctgtctctgtggcacccgatcaatggcttaaatctgtcgtttttgatattcaggtttcctcaatttagccttantgaaggaggggttgtacacactgccatttttgtattttaaaggaaaaatgactttcattcccaactgatttatgacctttcaggatgtcctccaagtgatgctttcagttgtaaacncgtgacttggggctgtcccctgcctggtctaaagtaaaaactgtaaaaattcntatggnctgggggtttccctgnngcgcctgtggggtgnggngnattcnnccctgggcantttnntanccntaannttttttgggncnggctgaatttngcctgccccggccttcccntnacttttaacntttanccaaaaccngggnaaaactgaaccnaaaattaccctttccccctgggcaaaaggggganttanggggaaatgntgtttctaaaagnccnggttncctggaagccccaantgga

SEQ ID NO: 296 - DNA, 1201 bp, Homo Sapiens
  misc_feature (1)..(1): n is a, c, g, or t
  misc_feature (932)..(932): n is a, c, g, or t
  misc_feature (949)..(949): n is a, c, g, or t
  misc_feature (1006)..(1006): n is a, c, g, or t
  misc_feature (1008)..(1008): n is a, c, g, or t
  misc_feature (1018)..(1018): n is a, c, g, or t
  misc_feature (1026)..(1026): n is a, c, g, or t
  misc_feature (1046)..(1046): n is a, c, g, or t
  misc_feature (1081)..(1081): n is a, c, g, or t
  misc_feature (1090)..(1090): n is a, c, g, or t
  misc_feature (1092)..(1092): n is a, c, g, or t
  misc_feature (1105)..(1105): n is a, c, g, or t
  misc_feature (1111)..(1111): n is a, c, g, or t
  misc_feature (1114)..(1114): n is a, c, g, or t
  misc_feature (1127)..(1127): n is a, c, g, or t
  misc_feature (1129)..(1129): n is a, c, g, or t
  misc_feature (1133)..(1133): n is a, c, g, or t
  misc_feature (1135)..(1136): n is a, c, g, or t
  misc_feature (1138)..(1138): n is a, c, g, or t
  misc_feature (1146)..(1146): n is a, c, g, or t
  misc_feature (1148)..(1148): n is a, c, g, or t
  misc_feature (1159)..(1159): n is a, c, g, or t
  misc_feature (1163)..(1163): n is a, c, g, or t
  misc_feature (1169)..(1169): n is a, c, g, or t
  misc_feature (1173)..(1173): n is a, c, g, or t
  misc_feature (1185)..(1185): n is a, c, g, or t
  misc_feature (1191)..(1191): n is a, c, g, or t
  misc_feature (1195)..(1195): n is a, c, g, or t
  misc_feature (1199)..(1199): n is a, c, g, or t
  misc_feature (1201)..(1201): n is a, c, g, or t
naatagagaaattactatgagaggatcgcatcaccatcaccatcacggatcctatttaggtgacactatagaatcgtcgacccacgcgtccgacgccatccagcagcaaactgtcgtggtgccggcatccagcctggccaatgccaaactcgtgccaaagactgtgcaccttgccaaccttaaccttttgcctcagggtgcccaggccacctctgaactccgccaagtgctaaccaaacctcagcaacaaataaagcaggcaataatcaatgcagcagcctcgcaaccccccaaaaaggtgtctcgagtccaggtggtgtcgtccttgcagagttctgtggtggaagctttcaacaaggtgctgagcagtgtcaatccagtccctgtttacatcccaaacctcagtcctcccgccaatgcagggatcacgttaccgacgcgtgggtacaagtgcttggagtgtggggactcctttgcacttgaaaagagtctgacccagcactacgacagacggagcgtgcgcatcgaagtaacgtgcaaccattgtacaaagaacctcgttttttacaacaaatgcagcctcctttcccatgcccgtgggcataaggagaaaggggtggtaatgcaatgctcccacttaattttaaagccagtcccagcagatcaaatgatagtttctccgtcaagcaatacttccacttcaacttccactcttcagagccctgtgggagctggcacacacactgtcacaaaaattcagtctggcataactgggacagtcatatcggctccttcaagcactcccatcaccccagccatgcccctagatgaagacccctccaaactgtgtagacatagtctaaaatgtttggagtgtaatgaagtcttccaggacgaaacatcactggctacacatttccagcaggctgcanatacgagtggacaaaanacttgcactatctgccaaatgctgcttcctaaccagtgcagttatgcatcacaccananaatccatcancacaaatntccctaaacctggccctgantggggggccatctgcaggtcggggcacttccaaanccccgtcancnaaaaatgtctgcnctaacnagnaaattggttttcnangggngnntngcaaggtngngaccctgaagngggntgcttnaaanttcaattcaagnttcccntggnaatntn

SEQ ID NO: 297 - DNA, 890 bp, Homo Sapiens
ctatgagaggatcgcatcaccatcaccatcacggatcctatttaggtgacactatagaatcgtcgacccacgcgtccgagaatactttgtggcctgaagttcaaaaactatatgggcacggttatgaaatattttgtgttacttgtaacagttcaaagactctgcttgcctcagcttgtaaggcagctaagaaagagcatgcagctatcattctttggaacactacatcttggaaacaggtgcagaatttagttttccacagtttgacagtcacgcagatggccttctcacctaatgagaagttcttactagctgtttccagagatcgaacctggtcattgtggaaaaagcaggatacaatctcacctgagttcgagccagtttttagtctttttgccttcaccaacaaaattacttctgtgcacagtagaattatttggtcttgtgattggagtcctgacagcaagtatttcttcactgggagtcgagacaaaaaggtggttgtctggggtgagtgtgactccactgatgactgtattgagcacaacattggcccctgctcctcagtcctggacgtgggtggggctgtgacagctgtcagcgtctgcccagtgctccacccttctcaacgatacgtggttgcagtaggattggagtgtggaaagatttgcttatatacctggaaaaagactgatcaagttccagaaataaatgactggacccactgtgtagaaacaagtcaaagccaaagtcatacactggctatcagaaaattatgctggaagaattgcagtggaaaaactgaacagaaggaagcagaaggtgctgagtggttacactttgcaagctgtggtgaagatcacactgtgaagatacacagagtcaataaa

SEQ ID NO: 298 - DNA, 945 bp, Homo Sapiens
  misc_feature (2)..(3): n is a, c, g, or t
  misc_feature (5)..(7): n is a, c, g, or t
  misc_feature (9)..(9): n is a, c, g, or t
  misc_feature (169)..(169): n is a, c, g, or t
  misc_feature (188)..(188): n is a, c, g, or t
  misc_feature (202)..(202): n is a, c, g, or t
  misc_feature (331)..(331): n is a, c, g, or t
  misc_feature (470)..(470): n is a, c, g, or t
  misc_feature (475)..(475): n is a, c, g, or t
  misc_feature (477)..(477): n is a, c, g, or t
  misc_feature (516)..(516): n is a, c, g, or t
  misc_feature (551)..(551): n is a, c, g, or t
  misc_feature (593)..(593): n is a, c, g, or t
  misc_feature (670)..(670): n is a, c, g, or t
  misc_feature (687)..(687): n is a, c, g, or t
  misc_feature (694)..(694): n is a, c, g, or t
  misc_feature (714)..(714): n is a, c, g, or t
  misc_feature (737)..(737): n is a, c, g, or t
  misc_feature (740)..(740): n is a, c, g, or t
  misc_feature (745)..(745): n is a, c, g, or t
  misc_feature (756)..(756): n is a, c, g, or t
  misc_feature (761)..(761): n is a, c, g, or t
  misc_feature (785)..(786): n is a, c, g, or t
  misc_feature (802)..(804): n is a, c, g, or t
  misc_feature (806)..(806): n is a, c, g, or t
  misc_feature (808)..(808): n is a, c, g, or t
  misc_feature (812)..(812): n is a, c, g, or t
  misc_feature (820)..(821): n is a, c, g, or t
  misc_feature (828)..(828): n is a, c, g, or t
  misc_feature (833)..(833): n is a, c, g, or t
  misc_feature (835)..(835): n is a, c, g, or t
  misc_feature (847)..(847): n is a, c, g, or t
  misc_feature (851)..(851): n is a, c, g, or t
  misc_feature (859)..(859): n is a, c, g, or t
  misc_feature (861)..(861): n is a, c, g, or t
  misc_feature (870)..(870): n is a, c, g, or t
  misc_feature (877)..(877): n is a, c, g, or t
  misc_feature (887)..(887): n is a, c, g, or t
  misc_feature (895)..(895): n is a, c, g, or t
  misc_feature (902)..(902): n is a, c, g, or t
  misc_feature (905)..(905): n is a, c, g, or t
  misc_feature (907)..(908): n is a, c, g, or t
  misc_feature (923)..(923): n is a, c, g, or t
  misc_feature (926)..(926): n is a, c, g, or t
  misc_feature (933)..(933): n is a, c, g, or t
  misc_feature (943)..(943): n is a, c, g, or t
annannntnaaagatattactatgagaggatcgcatcaccatcaccatcacggatcctatttaggtgacactatagaatcgtcgacccacgcgtccgccgccaggcggctcatcgagtccaggagtgcatcccctgacagtaggaaggtggtcaaatggaatgtggaanacacctttagctggcttcngaaggaccactcancctccaaggaggactacatggatcgcctggagcatctgcggaggcagtgtggcccccacgtctcggccgcagccaaggactccgtggaaggcatctgcagtaagatctaccacatctccctggagtacntcaaacggatccgagagaagcaccttgccatcctcaaggaaaacaacatctcaaaggaggtggaggcccctgaggtggagccccgcctagtgtactgctacccagtccggctggctgtgtctgcaccgcccatgcccancgtgnanatgcacatggagaacaacgtggtctgcatccggtataanggagagatggtcaaggtcagccgcaactacttcancaagctgtggctcctttaccgctacagctgcattgatgactntgcctttgagaggttcctgccccgggtctggtgtcttctccgaccgtaccagatgatgttcggcgtgggcctctacnaagggactggcctgcanggatcgntgcctgtgcatgtctttgangccctccaccgactctttggcgncancttcnagtgcttcgtntcacnccctcaactgctacttccgcccannactgttctgcctttcnnngnanaaanactgctanntttggcnccccncngggaacctgccnaaantttgcctncnactgaagtngtttcantttgaggccnaaaccctnccctttnttncnnaggaagctccatggnatngccatgntcctcctcantt

SEQ ID NO: 299 - DNA, 887 bp, Homo Sapiens
tgagaggtcgcatcaccatcaccatcacggatcctatttaggtgacactatagaatcgtcgacccacgcgtccggccgagcgcgccccgtccctcgcgcgcgatgctcccctggacggcgctcggcctggccctgagcttgcggctggcgctggcgcggagcggcgcggagcgcggtccaccagcatcagccccccgaggggacctgatgttcctgctggacagctcagccagcgtctctcactacgagttctcccgggttcgggagtttgtggggcagctggtggctccactgcccctgggcaccggggccctgcgtgccagtctggtgcacgtgggcagtcggccatacaccgagttccccttcggccagcacagctcgggtgaggctgcccaggatgcggtgcgtgcttctgcccagcgcatgggtgacacccacactggcctggcgctggtctatgccaaggaacagctgtttgctgaagcatcaggtgcccggccaggggtgcccaaagtgctggtgtgggtgacagatggcggctccagcgaccctgtgggcccccccatgcaggagctcaaggacctgggcgtcaccgtgttcattgtcagcaccggccgaggcaacttcctggagctgtcagccgctgcctcagcccctgccgagaagcacctgcactttgtggacgtggatgacctgcacatcattgtccaagagctgaggggctccattctcgacgcgatgcggccgctccctatagtgagtcgtattaagcttaattagctgagcttggactcctgttgatagatccagtaatgacctcagaactccatctggatttgttcagaacgctcggttgccgccgggcgttttttattggtgagaatcca

SEQ ID NO: 300 - DNA, 1142 bp, Homo Sapiens
  misc_feature (820)..(820): n is a, c, g, or t
  misc_feature (905)..(905): n is a, c, g, or t
  misc_feature (910)..(910): n is a, c, g, or t
  misc_feature (935)..(935): n is a, c, g, or t
  misc_feature (956)..(956): n is a, c, g, or t
  misc_feature (960)..(960): n is a, c, g, or t
  misc_feature (966)..(966): n is a, c, g, or t
  misc_feature (992)..(992): n is a, c, g, or t
  misc_feature (998)..(998): n is a, c, g, or t
  misc_feature (1002)..(1002): n is a, c, g, or t
  misc_feature (1005)..(1005): n is a, c, g, or t
  misc_feature (1019)..(1019): n is a, c, g, or t
  misc_feature (1036)..(1036): n is a, c, g, or t
  misc_feature (1041)..(1041): n is a, c, g, or t
  misc_feature (1051)..(1051): n is a, c, g, or t
  misc_feature (1053)..(1053): n is a, c, g, or t
  misc_feature (1064)..(1064): n is a, c, g, or t
  misc_feature (1074)..(1074): n is a, c, g, or t
  misc_feature (1076)..(1076): n is a, c, g, or t
  misc_feature (1081)..(1081): n is a, c, g, or t
  misc_feature (1090)..(1090): n is a, c, g, or t
  misc_feature (1094)..(1094): n is a, c, g, or t
  misc_feature (1098)..(1099): n is a, c, g, or t
  misc_feature (1101)..(1102): n is a, c, g, or t
  misc_feature (1105)..(1107): n is a, c, g, or t
  misc_feature (1111)..(1111): n is a, c, g, or t
  misc_feature (1117)..(1117): n is a, c, g, or t
  misc_feature (1132)..(1133): n is a, c, g, or t
  misc_feature (1135)..(1135): n is a, c, g, or t
aaatagagaaattactatgagaggatcgcatcaccatcaccatcacggatcctatttaggtgacactatagaatcgtcgacccacgcgtccgggccggcgaaagctatcttcctgcaccggcggccgggtgagggcggtgggagggagcggtgcctgcgctgtggccatgtctgtgtacgcagggggccggggccccgcgaagctgtgccctcaggccggccccggccggacacccttacccctccatgggtccggcagagggcagtgaccggcaccttctgtgcgtcctggactcctctgagaaacaggagagctcaaaggatggctactgacatgcagaggaagagaagcagcgaatgccttgatggcacattgactccttctgatggacagagtatggagagagctgagagccccacaccaggaatggcccagggaatggagccaggtgcgggccaggagggtgccatgttcgtccatgcccgttcctacgaggacctgactgagtcagaggatggggcagcttctggggacagccacaaggagggtaccaggggtcccccgccgctgcctacagacatgcgccagatcagccaggactttagcgagctaagcacccagctgacgggtgtggcccgggacctgcaggaggagatgctgccaggaagctctgaggattggctggaacccccaggggcagttgggcgaccagccacagagccccccagggagggcacaaccgagggggatgaggaggatgccacggaggcatggcgcctgcaccagaagcatgtctttgtgctgagtgaggcagggaancctgtgtactcccgctatgggtctgaagaggcactttccagcactatgggtgttatggtggccctggtgtccttcctggaggcanacaanaacgccatccgctccatccatgcanatggctacaaggtaatattcntgcnccggancccctggtgctaatggcggtggctcntacccngcantcngcacaaaaactggngcagaactgctctaatntactncaaatctaancnttttacggggncactaacccntnttcancaaaacaantttnattnngnnctnnntggntcaaancatcccaaaactgtnnantttggaa

SEQ ID NO: 301 - DNA, 1093 bp, Homo Sapiens
  misc_feature (3)..(3): n is a, c, g, or t
  misc_feature (89)..(89): n is a, c, g, or t
  misc_feature (709)..(709): n is a, c, g, or t
  misc_feature (760)..(760): n is a, c, g, or t
  misc_feature (762)..(762): n is a, c, g, or t
  misc_feature (770)..(770): n is a, c, g, or t
  misc_feature (788)..(788): n is a, c, g, or t
  misc_feature (795)..(795): n is a, c, g, or t
  misc_feature (813)..(813): n is a, c, g, or t
  misc_feature (856)..(856): n is a, c, g, or t
  misc_feature (868)..(868): n is a, c, g, or t
  misc_feature (874)..(874): n is a, c, g, or t
  misc_feature (878)..(878): n is a, c, g, or t
  misc_feature (882)..(882): n is a, c, g, or t
  misc_feature (908)..(908): n is a, c, g, or t
  misc_feature (923)..(923): n is a, c, g, or t
  misc_feature (942)..(942): n is a, c, g, or t
  misc_feature (948)..(948): n is a, c, g, or t
  misc_feature (950)..(950): n is a, c, g, or t
  misc_feature (959)..(959): n is a, c, g, or t
  misc_feature (970)..(970): n is a, c, g, or t
  misc_feature (976)..(977): n is a, c, g, or t
  misc_feature (989)..(989): n is a, c, g, or t
  misc_feature (999)..(999): n is a, c, g, or t
  misc_feature (1008)..(1008): n is a, c, g, or t
  misc_feature (1011)..(1011): n is a, c, g, or t
  misc_feature (1017)..(1018): n is a, c, g, or t
  misc_feature (1023)..(1023): n is a, c, g, or t
  misc_feature (1043)..(1043): n is a, c, g, or t
  misc_feature (1046)..(1046): n is a, c, g, or t
  misc_feature (1054)..(1054): n is a, c, g, or t
  misc_feature (1057)..(1057): n is a, c, g, or t
  misc_feature (1059)..(1059): n is a, c, g, or t
  misc_feature (1064)..(1066): n is a, c, g, or t
  misc_feature (1068)..(1068): n is a, c, g, or t
  misc_feature (1070)..(1070): n is a, c, g, or t
  misc_feature (1072)..(1073): n is a, c, g, or t
  misc_feature (1087)..(1087): n is a, c, g, or t
  misc_feature (1091)..(1091): n is a, c, g, or t
gantagagaaattactatgagaggatcgcatcaccatcaccatcacggatcctatttaggtgacactatagaatcgtcgacccacgcgntccgcccacgcgtccggctgcagctcgcccaccccacgacccacacacccctctgcctgccccagcccgcccatcgcttcccctttggagcctcctgctgggccactggctgggatcaggacaccagtgatgctcctgggaccctacgcaatctgcgcctgcgtctcatcagtcgccccacatgtaactgtatctacaaccagctgcaccagcgacacctgtccaacccggcccggcctgggatgctatgtgggggcccccagcctggggtgcagggcccctgtcagggagattccgggggccctgtgctgtgcctcgagcctgacggacactgggttcaggctggcatcatcagctttgcatcaagctgtgcccaggaggacgctcctgtgctgctgaccaacacagctgctcacagttcctcctgcaggctcgagttcagggggcagctttcctggcccagagcccagagaccccggagatgagtgatgaggacagctgtgtagcctgtggatccttgaggacagcaggtccccaggcaggagcaccctccccatggccctgggaggccaggctgatgcaccagggacagctggcctgtggcggagccctggtgtcanaggaggcggtgctaactgctgcccactgcttcattgggcgccaggccccanangaatggancgtaaggctggggaccanaccggangagtggggcctgaaacanctcatcctgcatggagcctacacccaccctgaggggggctaanaaatggccctcntgctgntggnccancctgtgaaactggggaaccagcctgnggcccctctgcctgncctatcctgaacaacaacntgcctnanggggaaacntggctgggttntgggannggcccccccaanaaaaaggaancaacttccntcnaaaaannggccngtgaaacctccttggggccnaanggccttgnaancnggttnnnangnannttcttgggggtgantggnaa

SEQ ID NO: 302 - DNA, 1142 bp, Homo Sapiens
  misc_feature (641)..(641): n is a, c, g, or t
  misc_feature (773)..(773): n is a, c, g, or t
  misc_feature (794)..(794): n is a, c, g, or t
  misc_feature (804)..(805): n is a, c, g, or t
  misc_feature (826)..(826): n is a, c, g, or t
  misc_feature (856)..(856): n is a, c, g, or t
  misc_feature (860)..(860): n is a, c, g, or t
  misc_feature (893)..(893): n is a, c, g, or t
  misc_feature (907)..(907): n is a, c, g, or t
  misc_feature (926)..(926): n is a, c, g, or t
  misc_feature (933)..(933): n is a, c, g, or t
  misc_feature (935)..(935): n is a, c, g, or t
  misc_feature (937)..(937): n is a, c, g, or t
  misc_feature (939)..(939): n is a, c, g, or t
  misc_feature (958)..(958): n is a, c, g, or t
  misc_feature (967)..(967): n is a, c, g, or t
  misc_feature (973)..(973): n is a, c, g, or t
  misc_feature (986)..(986): n is a, c, g, or t
  misc_feature (996)..(996): n is a, c, g, or t
  misc_feature (1010)..(1010): n is a, c, g, or t
  misc_feature (1034)..(1034): n is a, c, g, or t
  misc_feature (1053)..(1053): n is a, c, g, or t
  misc_feature (1059)..(1059): n is a, c, g, or t
  misc_feature (1063)..(1063): n is a, c, g, or t
  misc_feature (1069)..(1069): n is a, c, g, or t
  misc_feature (1071)..(1071): n is a, c, g, or t
  misc_feature (1083)..(1083): n is a, c, g, or t
  misc_feature (1088)..(1088): n is a, c, g, or t
  misc_feature (1090)..(1090): n is a, c, g, or t
  misc_feature (1105)..(1105): n is a, c, g, or t
  misc_feature (1108)..(1108): n is a, c, g, or t
  misc_feature (1112)..(1114): n is a, c, g, or t
  misc_feature (1117)..(1117): n is a, c, g, or t
  misc_feature (1125)..(1125): n is a, c, g, or t
  misc_feature (1135)..(1135): n is a, c, g, or t
gagaaattactatgagaggatcgcatcaccatcaccatcacggatcctatttaggtgacactatagaatcgtcgacccacgcgtccgagactccagttatggctcaacccaaagaagatgaagaggaagatgatgatgtagtggctcctaaaccacctattgaacctgaagaagagaaaactttaaagaaagatgaggaaaatgatagtaaagctccccctcatgagctgactgaagaagaaaagcaacaaatcttgcactctgaggaatttttaagtttctttgaccattctacaagaattgtagaaagagctctttctgagcagattaacatcttctttgactatagtgggagagatttggaagacaaagaaggagagattcaagcaggtgctaaactgtcattaaatcgacaattttttgacgaacgttggtcaaagcatcgggtggttagttgtttggattggtcatctcagtatccggagttactcgtggcttcctataacaacaatgaagatgcccctcatgagcctgatggtgtggcccttgtatggaatatgaaatacaaaaaaactaccccagagtatgtgtttcactgccagtcagctgtgatgtctgccacatttgcaaaatttcatccnaatcttgttgttggtggtacatattcaggccaaattgtgctttgggataaccgtagcaataaaagaactccagtgcaaagaactccactgtcagcagctgcacacacacaccctgtatattgtgtaaatgtngttggaacaccaaaatgctcncaatctgatnngcatctctactgatggaaaanttgttcatggagtctggacatgctttcccntccncaggatagcatggagttggttcataaacagtcnaaagcagtagctgngacatctatgtccttcccnggtgggnangncnaccactttgttgttgggantgaaaaagntctggntaccagcatgccnccctgggcancaaagctggaatcngtggaaatgtttgaggggcatcanggaccaatcctgggcatcnttgtcntgcncctgtngnaacaataaactnccccncncttttggcccttccnccnttgnnnggnaagaaaanctttggaaanctaaaaa

SEQ ID NO: 303 - DNA, 995 bp, Homo Sapiens
  misc_feature (653)..(653): n is a, c, g, or t
  misc_feature (661)..(661): n is a, c, g, or t
  misc_feature (709)..(709): n is a, c, g, or t
  misc_feature (732)..(732): n is a, c, g, or t
  misc_feature (735)..(735): n is a, c, g, or t
  misc_feature (738)..(738): n is a, c, g, or t
  misc_feature (778)..(778): n is a, c, g, or t
  misc_feature (795)..(795): n is a, c, g, or t
  misc_feature (807)..(807): n is a, c, g, or t
  misc_feature (820)..(820): n is a, c, g, or t
  misc_feature (824)..(824): n is a, c, g, or t
  misc_feature (830)..(830): n is a, c, g, or t
  misc_feature (837)..(837): n is a, c, g, or t
  misc_feature (850)..(850): n is a, c, g, or t
  misc_feature (865)..(865): n is a, c, g, or t
  misc_feature (876)..(876): n is a, c, g, or t
  misc_feature (888)..(888): n is a, c, g, or t
  misc_feature (890)..(890): n is a, c, g, or t
  misc_feature (892)..(892): n is a, c, g, or t
  misc_feature (905)..(905): n is a, c, g, or t
  misc_feature (914)..(914): n is a, c, g, or t
  misc_feature (921)..(921): n is a, c, g, or t
  misc_feature (926)..(926): n is a, c, g, or t
  misc_feature (931)..(932): n is a, c, g, or t
  misc_feature (934)..(934): n is a, c, g, or t
  misc_feature (937)..(937): n is a, c, g, or t
  misc_feature (945)..(945): n is a, c, g, or t
  misc_feature (954)..(954): n is a, c, g, or t
  misc_feature (957)..(958): n is a, c, g, or t
  misc_feature (962)..(962): n is a, c, g, or t
  misc_feature (972)..(972): n is a, c, g, or t
  misc_feature (988)..(988): n is a, c, g, or t
  misc_feature (994)..(995): n is a, c, g, or t
tagagaaattactatgagaggatcgcatcaccatcaccatcacggatcctatttaggtgacactatagaatcgtcgacccacgcgtccgcgccgctctccgctgcgggggaggccatggcggaaccttcccaggccccgaccccggccccggctgcgcagccccggccccttcagtccccagcccctgccccaactccgactcctgcacccagcccggcttcagccccgattccgactcccaccccggcaccagcccctgccccagctgcagccccagccggcagcacagggactggggggcccggggtaggaagtgggggggccgggagcgggggggatccggctcgacctggcctgagccagcagcagcgcgccagtcagaggaaggcgcaagtccgggggctgccgcgcgccaagaagcttgagaagctaggggtcttctcggcttgcaaggccaatgaaacctgtaagtgtaatggctggaaaaaccccaagccccccactgcaccccgcatggatctgcagcagccagctgccaacctgagtgagctgtgccgcagttgtgagcaccccttggctgaccacgtatcccacttggagaatgtgtcaaaggatgagataaaccgactgctggggatggtggtggatgtgnagaatctnttcatgtctgttcacaaggaagaggacacagaacaccaaagccaggtntatttctaacctcttcaagctantgnggnaaatgcattcttgcaaaatgacccgggccctgtggtgganggggtcccttggggaanccctccattttnaaaaaacttatantttnaacaanggtgtgnttaaacttttttncaataaaaaattttnattcacctggnttcccccgggancngnaaaaaaaattttnaaacttttnaaaaaangtttntttgnntnttngcttttanataattggnaanntttnaaaaaacctngccccaattttttggnaaaaann

SEQ ID NO: 304 - DNA, 953 bp, Homo Sapiens
ctatgagaggatcgcatcaccatcaccatcacggatcctatttaggtgacactatagaatcgtcgacccacgcgtccgagcttttcagtcgcatttttaactgcaacccagatgatatggcacgggacctagagcagggtgacgtgtcagagacaatcagagtcttctttgagcagagcaagtctttccccccagctgccaagagcctccttaccatccaggaagtggatgagttccttctgcggctgtccaagctcaccaaggaggatgagcagcaacaggccctacaggacattgcctccaggtgtacagccaatgaccttaaatgcatcatcaggttgatcaaacatgatctgaagatgaactcaggtgcaaaacatgtgttagacgcccttgaccccaatgcctatgaagccttcaaagcctcgcgcaacctgcaggatgtggtggagcgggtccttcacaacgcgcaggaggtggagaaggagccgggccagagacgagctctgagcgtccaggcctcgctgatgacacctgtgcagcccatgttggcggaggcctgcaagtccgttgagtatgcaatgaagaaatgtcccaatggcatgttctctgagatcaagtacgatggagagcgagtccaggtgcataagaatggagaccacttcagctacttcagccgcagtctcaagcccgtccttcctcacaaggtggcccactttaaggactacattccccaggcttttcctgggggccacagcatgatcttggattctgaagtgcttctgattgacaacaagacaggcaaaccactgccctttgggactctgggagtacacaagaaagcagccttccaggatgctaatgtctgcctgtttgtttttgattgtatctactttaatgatgtcagcttgatggacagacctctgtgtgagcggcggaagtttcttcatgac

SEQ ID NO: 305 - DNA, 846 bp, Homo Sapiens
  misc_feature (823)..(846): n is a, c, g, or t
agagagattactatgagaggatcgcatcaccatcaccatcacggatcctatttaggtgacactatagaatcgtcgacccacgcgtccgcacgtgggtcccgggcgcgtttcgggtgctggcggctgcagccggagttcaaacctaagcagctggaaggaaccatggccaactgtgagcgtaccttcattgcgatcaaaccagatggggtccagcggggtcttgtgggagagattatcaagcgttttgagcagaaaggattccgccttgttggtctgaaattcatgcaagcttccgaagatcttctcaaggaacactacgttgacctgaaggaccgtccattctttgccggcctggtgaaatacatgcactcagggccggtagttgccatggtctgggaggggctgaatgtggtgaagacgggccgagtcatgctcggggagaccaaccctgcagactccaagcctgggaccatccgtggagacttctgcatacaagttggcaggaacattatacatggcagtgattctgtggagagtgcagagaaggagatcggcttgtggtttcaccctgaggaactggtagattacacgagctgtgctcagaactggatctatgaatgacaggagggcagaccacattgcttttcacatccatttcccctccttcccatgggcagaggaccaggctgtaggaaatctagttatttacaggaacttcatcataatttggagggaagctcttggagctgtgagttctccctgtacagtgttaccatccccgaccatctgattaaaatgcttcctcccagcataggaaaaaaannnnnnnnnnnnnnnnnnnnnnnn

SEQ ID NO: 306 - DNA, 907 bp, Homo Sapiens
  misc_feature (789)..(789): n is a, c, g, or t
  misc_feature (792)..(792): n is a, c, g, or t
  misc_feature (801)..(801): n is a, c, g, or t
  misc_feature (846)..(846): n is a, c, g, or t
  misc_feature (849)..(849): n is a, c, g, or t
  misc_feature (853)..(853): n is a, c, g, or t
  misc_feature (884)..(906): n is a, c, g, or t
atatagagaaattaactatgagaggatcgcatcaccatcaccatcacggatcctatttaggtgacactatagaatcgtcgacccacgcgtccgggtggattcccagggactgtcggaggtgtggactctgcctgcctacctggtctgggaagatgttctaccatatctccctagagcacgaaatcctgctgcacccgcgctacttcggccccaacttgctcaacacggtgaagcagaagctcttcaccgaggtggaggggacctgcacagggaagtatggctttgtaattgctgtcaccaccattgacaatattggtgctggtgtgatccagccaggccgaggctttgtcctttatccagttaagtacaaggccattgttttccggccatttaaaggggaggtcgtggatgctgttgtcactcaggtcaacaaggttggactcttcacagaaattgggcccatgtcttgcttcatctctcgacattccatcccttcagagatggagtttgatcctaactccaacccaccatgttacaagacaatggatgaggatattgtgattcagcaggacgatgagatccgcttaaagattgtggggacccgtgtggacaagaatgacatttttgctattggctccctgatggacgattacttggggcttgtaagctgagcctggtggcctcctacccttggtcctactctaggaagtgtgattgtcacacttatcatgttgtccagaggtccagtctggctgctgttgtggaggcaaggaaggcaactcatcccanaangcatctggngcttcttgtaacttaactactgcctcctcatttttcagtatgtgntcnaaanataaaaagtccttgggttctcatgggaaaannnnnnnnnnnnnnnnnnnnnnng

SEQ ID NO: 307 - DNA, 872 bp, Homo Sapiens
  misc_feature (4)..(4): n is a, c, g, or t
  misc_feature (353)..(353): n is a, c, g, or t
  misc_feature (545)..(545): n is a, c, g, or t
  misc_feature (552)..(552): n is a, c, g, or t
  misc_feature (578)..(578): n is a, c, g, or t
  misc_feature (592)..(592): n is a, c, g, or t
  misc_feature (625)..(625): n is a, c, g, or t
  misc_feature (631)..(631): n is a, c, g, or t
  misc_feature (663)..(663): n is a, c, g, or t
  misc_feature (670)..(670): n is a, c, g, or t
  misc_feature (674)..(674): n is a, c, g, or t
  misc_feature (680)..(680): n is a, c, g, or t
  misc_feature (686)..(686): n is a, c, g, or t
  misc_feature (692)..(692): n is a, c, g, or t
  misc_feature (695)..(695): n is a, c, g, or t
  misc_feature (711)..(711): n is a, c, g, or t
  misc_feature (716)..(716): n is a, c, g, or t
  misc_feature (726)..(726): n is a, c, g, or t
  misc_feature (730)..(730): n is a, c, g, or t
  misc_feature (732)..(733): n is a, c, g, or t
  misc_feature (743)..(743): n is a, c, g, or t
  misc_feature (749)..(749): n is a, c, g, or t
  misc_feature (761)..(761): n is a, c, g, or t
  misc_feature (766)..(766): n is a, c, g, or t
  misc_feature (769)..(769): n is a, c, g, or t
  misc_feature (777)..(778): n is a, c, g, or t
  misc_feature (790)..(790): n is a, c, g, or t
  misc_feature (799)..(799): n is a, c, g, or t
  misc_feature (813)..(813): n is a, c, g, or t
  misc_feature (820)..(821): n is a, c, g, or t
  misc_feature (828)..(828): n is a, c, g, or t
  misc_feature (830)..(831): n is a, c, g, or t
  misc_feature (836)..(836): n is a, c, g, or t
  misc_feature (842)..(842): n is a, c, g, or t
  misc_feature (844)..(844): n is a, c, g, or t
  misc_feature (854)..(854): n is a, c, g, or t
  misc_feature (857)..(858): n is a, c, g, or t
  misc_feature (869)..(869): n is a, c, g, or t
atantagagaaattactatgagaggatcgcatcaccatcaccatcacggatcctatttaggtgacactatagaatcgtcgacccacgcgtccgcgcgccgcccctccccgcgctcagctgggcccagcctctcctctgtctctcctcggtctcagctctgggcgagcagcggcctgtctgaagagcatgcagcccccttactccccgcctggcctcgccatccctgcccccccagcctgacccccggccccagcatggcccagggtgccatgcgcttctgctcggaaggcgactgtgccatctccccaccacgatgcccacgccgctggctccccgaaggcccggtgccccanagccccccagccagcatgtatggcagcacaggctccttgctacggcgagtggcaggtccaggtcctcgaggccgggaactgggacgtgtgacagcaccctgtacacctctgcgtggccccccctcaccccgtgttgctccctcaccctgggcaccctcttcacccactgggcagcccccacccggggcccanagctctntggtcatcttccgctttgtggagaangccagtgtgaggcnactgaatggactacctgctccagggggcttgantcgganctgggatctgggtggggtttcttctcccaggnccacccnagcncttggncctggntccaancgnaagttacggctggaancatcnacatcaaaanccantnnccgacaagangaaagnttcggtccttanctggnaanccggaaanntttgtaaatggnccggccaanccccacccccaggnttgaaannaaaatgntnntttantccctntnttcccaaatnggnnctggggggccnccc

SEQ ID NO: 308 - DNA, 1316 bp, Homo Sapiens
  misc_feature (1)..(1): n is a, c, g, or t
  misc_feature (902)..(902): n is a, c, g, or t
  misc_feature (932)..(932): n is a, c, g, or t
  misc_feature (936)..(936): n is a, c, g, or t
  misc_feature (951)..(951): n is a, c, g, or t
  misc_feature (956)..(956): n is a, c, g, or t
  misc_feature (974)..(974): n is a, c, g, or t
  misc_feature (981)..(981): n is a, c, g, or t
  misc_feature (983)..(983): n is a, c, g, or t
  misc_feature (996)..(996): n is a, c, g, or t
  misc_feature (1006)..(1006): n is a, c, g, or t
  misc_feature (1012)..(1012): n is a, c, g, or t
  misc_feature (1014)..(1014): n is a, c, g, or t
  misc_feature (1023)..(1023): n is a, c, g, or t
  misc_feature (1026)..(1026): n is a, c, g, or t
  misc_feature (1031)..(1031): n is a, c, g, or t
  misc_feature (1035)..(1035): n is a, c, g, or t
  misc_feature (1041)..(1041): n is a, c, g, or t
  misc_feature (1043)..(1043): n is a, c, g, or t
  misc_feature (1052)..(1052): n is a, c, g, or t
  misc_feature (1064)..(1064): n is a, c, g, or t
  misc_feature (1068)..(1068): n is a, c, g, or t
  misc_feature (1073)..(1073): n is a, c, g, or t
  misc_feature (1082)..(1082): n is a, c, g, or t
  misc_feature (1085)..(1085): n is a, c, g, or t
  misc_feature (1094)..(1094): n is a, c, g, or t
  misc_feature (1109)..(1109): n is a, c, g, or t
  misc_feature (1118)..(1118): n is a, c, g, or t
  misc_feature (1123)..(1123): n is a, c, g, or t
  misc_feature (1131)..(1131): n is a, c, g, or t
  misc_feature (1143)..(1143): n is a, c, g, or t
  misc_feature (1157)..(1157): n is a, c, g, or t
  misc_feature (1168)..(1168): n is a, c, g, or t
  misc_feature (1175)..(1176): n is a, c, g, or t
  misc_feature (1183)..(1183): n is a, c, g, or t
  misc_feature (1189)..(1189): n is a, c, g, or t
  misc_feature (1204)..(1204): n is a, c, g, or t
  misc_feature (1208)..(1208): n is a, c, g, or t
  misc_feature (1212)..(1212): n is a, c, g, or t
  misc_feature (1217)..(1217): n is a, c, g, or t
  misc_feature (1222)..(1222): n is a, c, g, or t
  misc_feature (1227)..(1228): n is a, c, g, or t
  misc_feature (1234)..(1234): n is a, c, g, or t
  misc_feature (1239)..(1239): n is a, c, g, or t
  misc_feature (1252)..(1253): n is a, c, g, or t
  misc_feature (1258)..(1258): n is a, c, g, or t
  misc_feature (1263)..(1263): n is a, c, g, or t
  misc_feature (1279)..(1279): n is a, c, g, or t
  misc_feature (1282)..(1282): n is a, c, g, or t
  misc_feature (1287)..(1287): n is a, c, g, or t
  misc_feature (1293)..(1293): n is a, c, g, or t
  misc_feature (1296)..(1296): n is a, c, g, or t
  misc_feature (1299)..(1300): n is a, c, g, or t
  misc_feature (1303)..(1303): n is a, c, g, or t
  misc_feature (1308)..(1308): n is a, c, g, or t
naatagagaaattactatgagaggatcgcatcaccatcaccatcacggatcctatttaggtgacactatagaatcgtcgacccacgcgtccgtagacatgggcactccacagaaggatgttattatcaagtcagatgcaccggacactttgttattggagaaacatgcagattatatcgcatcctatggctcaaagaaagatgattatgaatactgtatgtctgagtatttgagaatgagtggcatctattggggtctgacagtaatggatctcatgggacaacttcatcgcatgaatagagaagagattctggcatttattaagtcttgccaacatgaatgtggtggaataagtgctagtatcggacatgatcctcatcttttatacactcttagtgctgtccagattcttacgctgtatgacagtattaatgttattgacgtaaataaagttgtggaatatgttaaaggtctacagaaagaagatggttcttttgctggagatatttggggagaaattgacacaagattctctttttgtgcggtggcaactttggctttgttggggaagcttgatgctattaatgtggaaaaggcaatcgaatttgttttatcctgtatgaactttgacggtggatttggttgcagaccaggttctgaatcccatgctgggcagatctattgttgcacaggatttctggctattacaagtcagttgcatcaagtaaattctgatttacttggctggtggctttgtgaacgacaattaccctcaggcgggctcaatggaaggccggagaagttaccagatgtatgctactcatggtgggtcctggcttccctaaagataattggaagacttcattggattgatagagagaaactgcgtaatttcattttancatgtcaagatgaaaaaccggggggaattngcanacaggcccaggaganatggnggatccctttccataccntattggnantgctggattgtcnctttgggganaaaaananaataaaccngtnaaccngccntttgcntnccgaaaaantgcctccaaaantganggtcncccggaccnagngacctaaantccttgaattgaaanttgccaaanaaaanttttgccntttaacctttcnggatttgaagggcntttcccaaccnaaaaggnnccccggnaaaaantttggaaaatggggnaaanttanttttnaaaantttannaatttnccccnttggaaaaaaaannccggnttttntttccccttttttccnaancccgntatccnaancannccntgggnaaaccccg

SEQ ID NO: 309 - DNA, 1179 bp, Homo Sapiens
  misc_feature (895)..(895): n is a, c, g, or t
  misc_feature (914)..(914): n is a, c, g, or t
  misc_feature (917)..(917): n is a, c, g, or t
  misc_feature (953)..(953): n is a, c, g, or t
  misc_feature (958)..(958): n is a, c, g, or t
  misc_feature (976)..(976): n is a, c, g, or t
  misc_feature (1008)..(1008): n is a, c, g, or t
  misc_feature (1020)..(1020): n is a, c, g, or t
  misc_feature (1025)..(1025): n is a, c, g, or t
  misc_feature (1028)..(1028): n is a, c, g, or t
  misc_feature (1033)..(1033): n is a, c, g, or t
  misc_feature (1050)..(1050): n is a, c, g, or t
  misc_feature (1052)..(1052): n is a, c, g, or t
  misc_feature (1055)..(1055): n is a, c, g, or t
  misc_feature (1059)..(1059): n is a, c, g, or t
  misc_feature (1069)..(1069): n is a, c, g, or t
  misc_feature (1078)..(1078): n is a, c, g, or t
  misc_feature (1086)..(1086): n is a, c, g, or t
  misc_feature (1098)..(1098): n is a, c, g, or t
  misc_feature (1100)..(1100): n is a, c, g, or t
  misc_feature (1109)..(1109): n is a, c, g, or t
  misc_feature (1128)..(1128): n is a, c, g, or t
  misc_feature (1140)..(1140): n is a, c, g, or t
  misc_feature (1142)..(1142): n is a, c, g, or t
  misc_feature (1153)..(1153): n is a, c, g, or t
  misc_feature (1164)..(1164): n is a, c, g, or t
  misc_feature (1166)..(1166): n is a, c, g, or t
  misc_feature (1168)..(1168): n is a, c, g, or t
  misc_feature (1173)..(1173): n is a, c, g, or t
  misc_feature (1175)..(1175): n is a, c, g, or t
  misc_feature (1179)..(1179): n is a, c, g, or t
tagagaaattactatgagaggatcgcatcaccatcaccatcacggatcctatttaggtgacactatagaatcgtcgacccacgcgtccgcccggccggaagccgctgtcggggagccggcggtggggctggacgcaggtgcaactgacatgggtgaaccccagggatccatgcggattctagtgacagggggctctgggctggtaggcaaagccatccagaaggtggtagcagatggagctggacttcctggagaggactgggtgtttgtctcctctaaagacgccgatctcacggatacagcacagacccgcgccctgtttgagaaggtccaacccacacacgtcatccatcttgctgcaatggtggggggcctgttccggaatatcaaatacaatttggacttctggaggaaaaacgtgcacatgaacgacaacgtcctgcactcggcctttgaggtgggcgcccgcaaggtggtgtcctgcctgtccacctgtatcttccctgacaagatgacctacccgatagatgagaccatgatccacaatgggcctccccacaacagcaattttgggtactcgtatgccaagaggatgatcgacgtgcagaacagggcctacttccagcagtacggctgcaccttcaccgctgtcatccccaccaacgtcttcgggccccacgacaacttcaacatcgaggatggccacgtgctgcctggcctcatccacaaggtgcacctggccaagagcagcggctcggccctgacggtgtggggtacagggaatccgcggaggcagttcatatactcgctggacctggcccagctctttatctgggtcctgcgggagtacaatgaagtggagcccatcatcctctccgtgggcgaggaaaatgangtctccatcaaggaggcanccnaggcggtggtggaggccatggacttccatggggaantcacntttgatacaaccaagtcngatgggcagtttaaaaaaacagccagtaacancaagctgaaganctacntgnccganttccggttcaacccttnancangcgntaaagaaacntgtgcttgnttcctganaactacaaacangncccgaaatnaactgaaaaaggatcaggnccaccgaaaatngntggaaaaccanggccccacccntnanccttncnggan

SEQ ID NO: 310 - DNA, 715 bp, Homo Sapiens
  misc_feature (1)..(1): n is a, c, g, or t
  misc_feature (685)..(685): n is a, c, g, or t
  misc_feature (691)..(692): n is a, c, g, or t
  misc_feature (695)..(697): n is a, c, g, or t
  misc_feature (699)..(702): n is a, c, g, or t
  misc_feature (704)..(715): n is a, c, g, or t
naattagagaaattactatgagaggatcgcatcaccatcaccatcacggatcctatttaggtgacactatagaatcgtcgacccacgcgtccgtggcttctcatcgtctgctcctcctctgccttgctggactggtatttgtgtctgaggctggccctacgggcaccggtgaatccaagtgtcctctgatggtcaaagttctagatgctgtccgaggcagtcctgccatcaatgtggccgtgcatgtgttcagaaaggctgctgatgacacctgggagccatttgcctctgggaaaaccagtgagtctggagagctgcatgggctcacaactgaggaggaatttgtagaagggatatacaaagtggaaatagacaccaaatcttactggaaggcacttggcatctccccattccatgagcatgcagaggtggtattcacagccaacgactccggcccccgccgctacaccattgccgccctgctgagcccctactcctattccaccacggctgtcgtcaccaatcccaaggaatgagggacttctcctccagtggacctgaaggacgagggatgggatttcatgtaaccaagagtattccatttttactaaagcagtgttttcacctcatatgctatgttagaagtccaggcagagacaataaaacattcctgtgaaaggcaaanaaaaannaannnannnnannnnnnnnnnnn

SEQ ID NO: 311 - DNA, 1213 bp, Homo Sapiens
  misc_feature (2)..(2): n is a, c, g, or t
  misc_feature (294)..(294): n is a, c, g, or t
  misc_feature (786)..(786): n is a, c, g, or t
  misc_feature (819)..(819): n is a, c, g, or t
  misc_feature (878)..(878): n is a, c, g, or t
  misc_feature (891)..(891): n is a, c, g, or t
  misc_feature (899)..(899): n is a, c, g, or t
  misc_feature (907)..(907): n is a, c, g, or t
  misc_feature (951)..(951): n is a, c, g, or t
  misc_feature (957)..(957): n is a, c, g, or t
  misc_feature (975)..(975): n is a, c, g, or t
  misc_feature (981)..(981): n is a, c, g, or t
  misc_feature (994)..(994): n is a, c, g, or t
  misc_feature (1013)..(1013): n is a, c, g, or t
  misc_feature (1017)..(1017): n is a, c, g, or t
  misc_feature (1021)..(1021): n is a, c, g, or t
  misc_feature (1030)..(1030): n is a, c, g, or t
  misc_feature (1034)..(1034): n is a, c, g, or t
  misc_feature (1040)..(1040): n is a, c, g, or t
  misc_feature (1057)..(1057): n is a, c, g, or t
  misc_feature (1060)..(1060): n is a, c, g, or t
  misc_feature (1063)..(1063): n is a, c, g, or t
  misc_feature (1068)..(1068): n is a, c, g, or t
  misc_feature (1078)..(1078): n is a, c, g, or t
  misc_feature (1087)..(1087): n is a, c, g, or t
  misc_feature (1090)..(1090): n is a, c, g, or t
  misc_feature (1094)..(1094): n is a, c, g, or t
  misc_feature (1126)..(1126): n is a, c, g, or t
  misc_feature (1145)..(1147): n is a, c, g, or t
  misc_feature (1149)..(1149): n is a, c, g, or t
  misc_feature (1156)..(1156): n is a, c, g, or t
  misc_feature (1165)..(1165): n is a, c, g, or t
  misc_feature (1168)..(1168): n is a, c, g, or t
  misc_feature (1180)..(1180): n is a, c, g, or t
  misc_feature (1182)..(1183): n is a, c, g, or t
  misc_feature (1185)..(1185): n is a, c, g, or t
  misc_feature (1187)..(1187): n is a, c, g, or t
  misc_feature (1199)..(1199): n is a, c, g, or t
  misc_feature (1211)..(1212): n is a, c, g, or t
gnatagagaaattaactatgagaggatcgcatcaccatcaccatcacgggatcctatttaggtgacactatagaatcgtcgacccacgcgtccgcccacgcgtccgcccacgcgtccgtgcaacctttgcggctccaacatggctccgcggctgtgcagcatctctgtgacggcgcggcggctgctggggggcccggggcctcgcgctggggacgttgcgtctgcagctgcggcgcgtttctattccaaggacaatgaaggcagctggttccgctccctctttgttcacaaagnggatccccggaaggatgcccactccaccctgctgtccaagaaggaaaccagcaacctctataagatccagtttcacaatgtaaagcctgaatacctggatgcctacaacagcctcacggaggctgtgctgcccaagcttcacctggatgaggactacccatgctcactcgtgggcaactggaacacgtggtatggggagcaggaccaggcagtgcacctgtggcgattctcaggtggctacccagccctcatggactgcatgaacaagctcaaaacaataaggagtacctggagttccgaagggagcggagccagatgctgctgtccaggagaaaccagctgctccttgagttcagcttctggaatgagccacagcccagaatgggtcccaacatctatgagctgaggacatacaagctcaagccaggaaccatgatcgagtgggggaacaactgggctcgggccatcaagtaccggcaggagaaccaggangcagtgggcggcttcttctcacagataggaganctctacgtggtgcaccatctctgggcctataaagacctgcagtctcgggaggagactcnaaacgctgcctgnaagaaaanaggctggnatgaaaatgtctactatacagtccccctggtgcgacacatggantctagnatcatgatccccttgaanatctcncctctgcaatgangctgcctaaacttcaactncttncccnttttccctnaggnaacccnaaaaaaagggcactccnggnccngctgnctgggtttgncttggctcnggnagantcttaagggcatgctcatttcaaaaaaggggnaactaaaggttgaaaattnnnanaataaantttgccaanccnttttaatttccngnngncncccccccccggnaaaaaaaatttnna

SEQ ID NO: 312 - DNA, 1058 bp, Homo Sapiens
  misc_feature (859)..(859): n is a, c, g, or t
  misc_feature (879)..(879): n is a, c, g, or t
  misc_feature (890)..(890): n is a, c, g, or t
  misc_feature (932)..(932): n is a, c, g, or t
  misc_feature (947)..(947): n is a, c, g, or t
  misc_feature (951)..(951): n is a, c, g, or t
  misc_feature (960)..(960): n is a, c, g, or t
  misc_feature (966)..(966): n is a, c, g, or t
  misc_feature (969)..(969): n is a, c, g, or t
  misc_feature (976)..(976): n is a, c, g, or t
  misc_feature (980)..(980): n is a, c, g, or t
  misc_feature (983)..(983): n is a, c, g, or t
  misc_feature (990)..(990): n is a, c, g, or t
  misc_feature (993)..(993): n is a, c, g, or t
  misc_feature (997)..(997): n is a, c, g, or t
  misc_feature (1000)..(1000): n is a, c, g, or t
  misc_feature (1002)..(1002): n is a, c, g, or t
  misc_feature (1016)..(1016): n is a, c, g, or t
  misc_feature (1020)..(1020): n is a, c, g, or t
  misc_feature (1027)..(1027): n is a, c, g, or t
  misc_feature (1043)..(1043): n is a, c, g, or t
  misc_feature (1050)..(1052): n is a, c, g, or t
  misc_feature (1057)..(1057): n is a, c, g, or t
aatagagaaattactatgagaggatcgcatcaccatcaccatcacggatcctatttaggtgacactatagaatcgtcgacccacgcgtccgtctgcttctatggcccccctggcgtgggtaagaccagcattgctcgctccatcgcccgcgccctgaaccgagagtacttccgcttcagcgtcgggggcatgactgacgtggctgagatcaagggccacaggcggacctacgtgggcgccatgcccgggaagatcatccagtgtttgaagaagaccaagacggagaaccccctgatcctcatcgacgaggtggacaagatcggccgaggctaccagggggacccgtcgtcggcactgctggagctgctggacccagagcagaatgccaacttcctggaccactacctggacgtgcccgtggacttgtccaaggtgctgttcatctgcacggccaacgtcacggacaccatccccgagccgctgcgagaccgtatggagatgatcaacgtgtcgggctacgtggcccaggagaagctggccattgcggagcgctacctggtgccccaggctcgcgccctgtgtggcttggatgagagcaaggccaagctgtcatcggacgtgctgacgctgctcatcaagcagtactgccgcgagagcggtgtccgcaacctgcagaagcaagtggagaaggtgttacggaaatcggcctacaagattgtcagcggcgaggccgagtccgtggaggtgacgcccgagaacctgcaggacttcgtggggaagcccgtgttcaccgtggagcgcatgtatgacgtgacaccgcccggcgtggtcatggggctggcctggaccgcaatgggangctccacgctgtttgtgganacatccctganacggccacaggacaaggatgccaagggtgacaaggatggcancctggaggtgacagnccanctgggggangtgatnaangaaaacncccncanaacctanacnttcncananccttcctcatgcancacnccccccnccaatgactacctggngacctcnnnatccnc

SEQ ID NO: 313 - DNA, 1225 bp, Homo Sapiens
  misc_feature (847)..(847): n is a, c, g, or t
  misc_feature (869)..(869): n is a, c, g, or t
  misc_feature (875)..(875): n is a, c, g, or t
  misc_feature (881)..(881): n is a, c, g, or t
  misc_feature (929)..(929): n is a, c, g, or t
  misc_feature (942)..(942): n is a, c, g, or t
  misc_feature (966)..(966): n is a, c, g, or t
  misc_feature (970)..(970): n is a, c, g, or t
  misc_feature (978)..(978): n is a, c, g, or t
  misc_feature (982)..(982): n is a, c, g, or t
  misc_feature (986)..(986): n is a, c, g, or t
  misc_feature (1004)..(1004): n is a, c, g, or t
  misc_feature (1009)..(1009): n is a, c, g, or t
  misc_feature (1014)..(1014): n is a, c, g, or t
  misc_feature (1035)..(1035): n is a, c, g, or t
  misc_feature (1040)..(1040): n is a, c, g, or t
  misc_feature (1046)..(1046): n is a, c, g, or t
  misc_feature (1058)..(1059): n is a, c, g, or t
  misc_feature (1068)..(1069): n is a, c, g, or t
  misc_feature (1098)..(1098): n is a, c, g, or t
  misc_feature (1103)..(1103): n is a, c, g, or t
  misc_feature (1107)..(1107): n is a, c, g, or t
  misc_feature (1112)..(1112): n is a, c, g, or t
  misc_feature (1119)..(1120): n is a, c, g, or t
  misc_feature (1124)..(1124): n is a, c, g, or t
  misc_feature (1126)..(1127): n is a, c, g, or t
  misc_feature (1129)..(1129): n is a, c, g, or t
  misc_feature (1140)..(1140): n is a, c, g, or t
  misc_feature (1148)..(1148): n is a, c, g, or t
  misc_feature (1158)..(1158): n is a, c, g, or t
  misc_feature (1180)..(1180): n is a, c, g, or t
  misc_feature (1187)..(1187): n is a, c, g, or t
  misc_feature (1193)..(1193): n is a, c, g, or t
  misc_feature (1196)..(1196): n is a, c, g, or t
  misc_feature (1199)..(1199): n is a, c, g, or t
  misc_feature (1211)..(1211): n is a, c, g, or t
  misc_feature (1220)..(1220): n is a, c, g, or t
  misc_feature (1224)..(1225): n is a, c, g, or t
tagagaaattactatgagaggatcgcatcaccatcaccatcacggatcctatttaggtgacactatagaatcgtcgacccacgcgtccgaggaaagcgcgaggagccgccgccaccaccagcgcagcagtcctggagctgtgaggagattcgggccgtcaccctgcctcccctgcgtcccgccaccggccgcttctgtcctcggacccattccaacaatctcgtaaaacatggtggattactatgaagttctaggcgtgcagagacatgcctcacccgaggatattaaaaaggcatatcggaaactggcactgaagtggcatccagataaaaatcctgagaataaagaagaagcagagagaaaattcaagcaagtagcggaggcatatgaagtgctgtcggatgctaagaaacgggacatctatgacaaatatggcaaagaaggattaaatggtggaggaggaggtggaagtcattttgacagtccatttgaatttggcttcacattccgtaacccagatgatgtcttcagggaattttttggtggaagggacccattttcatttgacttctttgaagacccttttgaggacttctttgggaatcgaaggggtccccgaggaagcagaagccgagggacggggtcgtttttctctgcgttcagtggatttccgtcttttggaagtggattttcttcttttgatacaggatttacttcatttgggtcactaggtcacgggggcctcacttcattctcttccacgtcatttggtggtagtggcatgggcaacttcaaatcgatatcaacttcaactaaaatggttaatggcagaaaaatcactacaaanagaattgtcgagaacggtcaanaaagantaaaanttgaagaaaatggccagttaaaagtccttaacaataaatggtaaggancacctgctgcccnttggaaaaaaaagtaattcacgcncgcncttaacanaaantgtnaacttataacaagccccntttgnggatnacaggaaacttttttttgaanatttncaaacnaactccactttnnataaattgnncctaaagtattttaaaaccgcctcctcgnaaccncttntttgncaaaaanntttngnntngattggtgggnaccccaanaaaaggaccntttttttttttttctttaaaanttggtgnaaaatnccnggnaggccctttttnttttttttnaaann

SEQ ID NO: 314 - DNA, 943 bp, Homo Sapiens
gagaggatcgcatcaccatcaccatcacggatcctatttaggtgacactatagaatcgtcgacccacgcgtccgggagcagctggagaaagccaaggcctatgcagccaacagccaccaggggcagatgctggcccagtatatagagagcttcacccagggctccatcgaggcccacaagaggggctcccgcttctggatccaggacaaaggccccatcgtggagagttacatcgggttcatcgagagctaccgcgacccctttggttcccgaggagaatttgaaggtttcgtagctgtggtgaacaaggccatgagtgccaagtttgagcggctggtggcgagcgcagagcagctgctgaaggagctgccctggcccccaacctttgagaaggacaagttcctcacccctgacttcacctccctggatgttctcaccttcgctggctccggcatccctgccggcatcaacatccccaactacgatgatctgaggcagacggaaggctttaagaacgtgtcgctggggaatgtgctggctgtggcctacgccacgcagcgggagaagcttacctttctggaggaggatgacaaggacctgtacatcctctggaaggggccctccttcgatgtgcaggtgggcctgcacgagctgctgggccatggcagtggcaagctcttcgtacaggacgaaaaaggagcattcaactttgaccaggaaacagtgatcaacccagagacgggcgagcaggtgagggaggcctcagcagagccccagggtactgggagggtgggcacaggtggggcagtggccaccctaagcccgacagtggagctccttttccagattcagagctggtatcggagcggggagacctgggatagcaagttcagcaccatcgcctccagctacgaagagtgccgggctgagagcgtgggtctct

SEQ ID NO: 315 - DNA, 922 bp, Homo Sapiens
  misc_feature (2)..(2): n is a, c, g, or t
  misc_feature (4)..(5): n is a, c, g, or t
  misc_feature (732)..(732): n is a, c, g, or t
  misc_feature (756)..(756): n is a, c, g, or t
  misc_feature (796)..(796): n is a, c, g, or t
  misc_feature (801)..(801): n is a, c, g, or t
  misc_feature (813)..(813): n is a, c, g, or t
  misc_feature (824)..(824): n is a, c, g, or t
  misc_feature (832)..(832): n is a, c, g, or t
  misc_feature (856)..(856): n is a, c, g, or t
  misc_feature (859)..(859): n is a, c, g, or t
  misc_feature (869)..(869): n is a, c, g, or t
  misc_feature (879)..(879): n is a, c, g, or t
  misc_feature (882)..(883): n is a, c, g, or t
  misc_feature (885)..(886): n is a, c, g, or t
  misc_feature (908)..(908): n is a, c, g, or t
  misc_feature (910)..(912): n is a, c, g, or t
  misc_feature (917)..(917): n is a, c, g, or t
  misc_feature (920)..(922): n is a, c, g, or t
anannagagaaattactatgagaggatcgcatcaccatcaccatcacggatcctatttaggtgacactatagaatcgtcgacccacgcgtccgaccgggcgccacatggacccagccggcccgagcgcgccccgccgctgaccgcccgcgccccgggaaggaagaacactcgctcccggccatacttgcgtgtgagttctgacccctggaggagccactgtggaagcagagcaatcgccatggagtttgtgatgaagcaggctctaggaggggccaccaaggacatggggaagatgctggggggtgacgaggagaaggacccagacgccgccaagaaggaggaggagcggcaggaggcgctgcgccaggcggaggaggagcgcaaggccaagtacgccaagatggaggcggagcgcgaggccgtgcgccagggcatccgagacaagtacggcatcaagaagaaggaggagcgcgaggccgaggcccaggccgccatggaggccaactccgaggggagcttgacgcggcccaagaaggccatcccgccgggctgcggggacgaggtggaggaggaggacgagagcatcctggacaccgtcatcaagtacctgcccgggccgctgcaggacatgctcaagaagtagccccgcgcgggacagcggccccgcggagcccccgcccctccccctacagatcctccgcggaggcccctgagggacgagcagagcgcancccccacgccgatataagccatanccccaggcccgccctgcccgcgcccgccgcctcccttcanccggnaaggggcgcgcncccccaggaanccccccanttccgccccgtgctcctctgtccncgngtggttgganccccatcccntgnnannccccttttcttttgttgttttncnnnccacncannn

SEQ ID NO: 316 - DNA, 1335 bp, Homo Sapiens
  misc_feature (931)..(931): n is a, c, g, or t
  misc_feature (963)..(963): n is a, c, g, or t
  misc_feature (981)..(981): n is a, c, g, or t
  misc_feature (994)..(994): n is a, c, g, or t
  misc_feature (998)..(998): n is a, c, g, or t
  misc_feature (1017)..(1017): n is a, c, g, or t
  misc_feature (1020)..(1020): n is a, c, g, or t
  misc_feature (1033)..(1033): n is a, c, g, or t
  misc_feature (1054)..(1054): n is a, c, g, or t
  misc_feature (1062)..(1062): n is a, c, g, or t
  misc_feature (1093)..(1093): n is a, c, g, or t
  misc_feature (1098)..(1098): n is a, c, g, or t
  misc_feature (1102)..(1102): n is a, c, g, or t
  misc_feature (1115)..(1115): n is a, c, g, or t
  misc_feature (1139)..(1139): n is a, c, g, or t
  misc_feature (1150)..(1150): n is a, c, g, or t
  misc_feature (1152)..(1152): n is a, c, g, or t
  misc_feature (1160)..(1160): n is a, c, g, or t
  misc_feature (1173)..(1173): n is a, c, g, or t
  misc_feature (1183)..(1183): n is a, c, g, or t
  misc_feature (1188)..(1188): n is a, c, g, or t
  misc_feature (1203)..(1203): n is a, c, g, or t
  misc_feature (1212)..(1213): n is a, c, g, or t
  misc_feature (1229)..(1229): n is a, c, g, or t
  misc_feature (1240)..(1240): n is a, c, g, or t
  misc_feature (1255)..(1255): n is a, c, g, or t
  misc_feature (1258)..(1258): n is a, c, g, or t
  misc_feature (1267)..(1267): n is a, c, g, or t
  misc_feature (1285)..(1286): n is a, c, g, or t
  misc_feature (1289)..(1289): n is a, c, g, or t
  misc_feature (1291)..(1291): n is a, c, g, or t
  misc_feature (1303)..(1304): n is a, c, g, or t
  misc_feature (1307)..(1307): n is a, c, g, or t
  misc_feature (1321)..(1321): n is a, c, g, or t
  misc_feature (1331)..(1331): n is a, c, g, or t
  misc_feature (1333)..(1333): n is a, c, g, or t
agaaattactatgagaggatcgcatcaccatcaccatcacggatcctatttaggtgacactatagaatcgtcgacccacgcgtccgcccacgcgtccggcagcacgacgagcagtggctactgcagccaagaggactcggactcggagctcgagcagtacttcaccgcgcgaacctcgctagctcgcaggccgcgccgggaccaggacgagcctgtggagtgggagacacctgacctttctcaagctgagattgagcagaagatcaaggagtacaatgcccagatcaacagcaacctcttcatgagcttgaacaaggacggttcttacacaggcttcatcaaggttcagctgaagctggtgcgccctgtctctgtgccctccagcaagaagccaccctccttgcaggatgcccggcggggcccaggacggggcacaagtgtcaggcgccgcacttccttttacctgcccaaggatgctgtcaagcacctgcatgtgctgtcacgcacaagggcacgtgaagtcattgaggccctgctgcgaaagttcttggtggtggatgacccccgcaagtttgcactctttgagcgcgctgagcgtcacggccaagtgtacttgcggaagctgttggatgatgagcagcccctgcggctgcggctcctggcagggcccagtgacaaggccctgagctttgtcctgaaggaaaatgactctggggaggtgaactgggacgccttcagcatgcctgaactacataacttcctacgtatcctgcagcgggaggaggaggagcacctccgccagatcctgcagaagtactcctattgccgccagaagatccaagaggccctgcacgcctgcccccttgggtgacctcttgtacccccaggtggaaggcaaacagcaggcagcgccaagtgcgtgccgtgtgantgtgacagggccagtggggcctgtggaatgantgtgcatggaggccctcntgtgctgggggantgancccaaaaaaaacgaaatanctngctccctgtgtcncctgtgggtgtaaccaggtanggtctgcnccctctgcctcattattgggccttatgggcnaggcngccntaaaaacttttcnggcctgcacaagaatggggcaaanaaaattccctnantttttttncaaaaggaaaatntggaaacctncaaanaaaaagggttttttngggggggannccccttctttaaaaangtttgaatttnaaggggcccagaatnttntaaaaaaanggggggcccaaaaggggnnttnanaaaatttttttnntanggcccccccacccngggggggggngngc

SEQ ID NO: 317 - DNA, 825 bp, Homo Sapiens
  misc_feature (796)..(799): n is a, c, g, or t
  misc_feature (806)..(825): n is a, c, g, or t
tagagaaattaactatgagaggatcgcatcaccatcaccatcacggatcctatttaggtgacactatagaatcgtcgacccacgcgtccgcccacgcgtccggcatggtgggcgcgctgcagttcgaggtgctcatggcggctgtgggcgcgccccgcttccccagtgcgctgggcctggtgttgctcgtggaggccgcggctgtgctcatcggaccgccctctgccggccgcctggtggatgcgttgaagaactatgagatcatcttctacctggccggctctgaggtggccctggctggggtcttcatggctgtcgccaccaactgctgcctgcgttgtgctaaagctgccccgtcaggcccaggcactgagggcggagccagtgacactgaggacgctgaggctgaaggggactctgagcccctgcctgttgttgcagaggaacccggcaacctggaggccctggaggtgctcagcgcccggggcgagcccacagaaccagaaatagaggcgaggccgaggctggctgccgagtctgtataactcagggtgctctgggtggggtggcccagtgacttgggaacacagcttcttgtctcagagagcctggtacgctgggaggctggtctggggtggtcactcccggggtccacgtctgggctccagttgatcccctgggtgtctgggaactgcctccctcatctgtgccccaagttccgccaggccctgccccatcgccagtgaagctgctatggagcaacaggaaactggtgataaagctcagctgaacgacnnnnaaaaaannnnnnnnnnnnnnnnnnnn

SEQ ID NO: 318 - DNA, 1172 bp, Homo Sapiens
  misc_feature (1)..(2): n is a, c, g, or t
  misc_feature (905)..(905): n is a, c, g, or t
  misc_feature (966)..(966): n is a, c, g, or t
  misc_feature (996)..(996): n is a, c, g, or t
  misc_feature (1027)..(1027): n is a, c, g, or t
  misc_feature (1036)..(1036): n is a, c, g, or t
  misc_feature (1042)..(1042): n is a, c, g, or t
  misc_feature (1090)..(1090): n is a, c, g, or t
  misc_feature (1102)..(1102): n is a, c, g, or t
  misc_feature (1108)..(1108): n is a, c, g, or t
  misc_feature (1119)..(1119): n is a, c, g, or t
  misc_feature (1125)..(1125): n is a, c, g, or t
  misc_feature (1135)..(1135): n is a, c, g, or t
  misc_feature (1144)..(1144): n is a, c, g, or t
  misc_feature (1147)..(1147): n is a, c, g, or t
  misc_feature (1149)..(1149): n is a, c, g, or t
  misc_feature (1152)..(1152): n is a, c, g, or t
  misc_feature (1154)..(1154): n is a, c, g, or t
  misc_feature (1162)..(1162): n is a, c, g, or t
  misc_feature (1165)..(1165): n is a, c, g, or t
  misc_feature (1168)..(1168): n is a, c, g, or t
  misc_feature (1172)..(1172): n is a, c, g, or t
nnaatagagaaattactatgagaggatcgcatcaccatcaccatcacggatcctatttaggtgacactatagaatcgtcgacccacgcgtccgccgagagcatcctaatgtcctatgatcacgtggaactcacattcaatgacatgaagaacgtgccagaagccttcaaagggaccaagaaaggcactgtctaccttaccccttaccgggtcatctttctgtccaagggcaaggatgccatgcagtccttcatgatgccattttatctcatgaaagactgtgagatcaagcagcccgtatttggtgcaaactacatcaagggaacagtgaaggcggaagcgggaggtggctgggaaggctctgcttcctacaagttgactttcacggcagggggcgccattgagttcggacagcggatgctccaggtggcatctcaagcctccagaggtgaagtccccagtggagcctatggctactcttacatgcccagcggggcctatgtctatcccccgccagtcgccaatggaatgtacccctgccctcctggctacccctatccaccgcccccacctgagttctatccaggaccccccatgatggacggggccatgggatacgtgcagcccccaccaccgccctaccctgggcccatggaacctccggtcagcggccccgatgtcccctccactcctgcagccgaagccaaggccgcagaagcagccgccagcgcctattacaacccaggcaatcctcacaacgtctacatgcccacgagccagccgccgccacctccctactacccaccggaagataagaagacccagtaggccctcctgcctccctgcctcccaccctcatctctctaccctacccctcccatcggggctgtgctggggcttggggangggagggggcgccttgttctccctccaggtctgatcataacaattaccaggaactagcatngtgggacattagggcccccggcctcggganagtgccgcccagcttccatgccagcccggancccaagtgntgccancgtacctccctcaccgtctggggctctctgggaacacggaacatcccnggtcctgtttcntcccancttccccctcnaaggantctttgggcncctcctccncgnantcnanttccccanttnggncccn

SEQ ID NO: 319 - DNA, 1282 bp, Homo Sapiens
  misc_feature (900)..(900): n is a, c, g, or t
  misc_feature (913)..(913): n is a, c, g, or t
  misc_feature (941)..(941): n is a, c, g, or t
  misc_feature (957)..(957): n is a, c, g, or t
  misc_feature (980)..(980): n is a, c, g, or t
  misc_feature (999)..(999): n is a, c, g, or t
  misc_feature (1002)..(1002): n is a, c, g, or t
  misc_feature (1019)..(1019): n is a, c, g, or t
  misc_feature (1021)..(1021): n is a, c, g, or t
  misc_feature (1024)..(1024): n is a, c, g, or t
  misc_feature (1039)..(1039): n is a, c, g, or t
  misc_feature (1046)..(1046): n is a, c, g, or t
  misc_feature (1064)..(1064): n is a, c, g, or t
  misc_feature (1081)..(1081): n is a, c, g, or t
  misc_feature (1110)..(1110): n is a, c, g, or t
  misc_feature (1113)..(1114): n is a, c, g, or t
  misc_feature (1123)..(1124): n is a, c, g, or t
  misc_feature (1127)..(1127): n is a, c, g, or t
  misc_feature (1136)..(1136): n is a, c, g, or t
  misc_feature (1143)..(1143): n is a, c, g, or t
  misc_feature (1146)..(1146): n is a, c, g, or t
  misc_feature (1160)..(1160): n is a, c, g, or t
  misc_feature (1175)..(1175): n is a, c, g, or t
  misc_feature (1195)..(1195): n is a, c, g, or t
  misc_feature (1203)..(1203): n is a, c, g, or t
  misc_feature (1218)..(1218): n is a, c, g, or t
  misc_feature (1231)..(1231): n is a, c, g, or t
  misc_feature (1234)..(1234): n is a, c, g, or t
  misc_feature (1237)..(1238): n is a, c, g, or t
  misc_feature (1241)..(1241): n is a, c, g, or t
  misc_feature (1243)..(1244): n is a, c, g, or t
  misc_feature (1248)..(1249): n is a, c, g, or t
  misc_feature (1256)..(1256): n is a, c, g, or t
  misc_feature (1266)..(1266): n is a, c, g, or t
  misc_feature (1282)..(1282): n is a, c, g, or t
aatagagaaattactatgagaggatcgcatcaccatcaccatcacggatcctatttaggtgacactatagaatcgtcgacccacgcgtccgctcgcatattaagccacttgcagcaagacagcctgaaacttcgtgactccctggagcttttggtggtggacgaagctgaccttcttttttcctttggctttgaagaagagctcaagagtctcctctgtcacttgccccggatttaccaggcttttctcatgtcagctacttttaacgaggacgtacaagcactcaaggagctgatattacataacccggttacccttaagttacaggagtcccagctgcctgggccagaccagttacagcagtttcaggtggtctgtgagactgaggaagacaaattcctcctgctgtatgccctgctcaagctgtcattgattcggggcaagtctctgctctttgtcaacactctagaacggagttaccggctacgcctgttcttggaacagttcagcatccccacctgtgtgctcaatggagagcttccactgcgctccaggtgccacatcatctcacagttcaaccaaggcttctacgactgtgtcatagcaactgatgctgaagtcctgggggccccagtcaagggcaagcgtcggggccgagggcccaaaggggacaaggcctctgatccggaagcaggtgtggcccggggcatagacttccaccatgtgtctgctgtgctcaactttgatcttcccccaacccctgaggcctacatccatcgagctggcaggacagcacgcgctaacaacccaggcatagtcttaacctttgtgcttcccacggagcagttccacttaggcaagattgaggagcttctcagtggagagaacaggggccccatnctgctcccctacnagttccggatggaggaaatcgagggctnccctatcgctgcaggnatgccatgcgctcagtgactaancaggccattcgggaggcanatngaaggaaatcaaggaananctnctgcattctgaaaanctaaaanatactttgaaaaaaaccntagggactccagtggcngggggatgactaacttttgcacccccagnggnnaaccccccnnggncaagttccngaaaacnggntcccccggcccccngggccgggaaccccncccaaaaagggaaaaaactntctccttntaagaaggccaaaanaaatcccaaaccntgnccnnttngnnaaannaaaaatncaaccccccncccccggggtggggcn

SEQ ID NO: 320 - DNA, 1141 bp, Homo Sapiens
  misc_feature (832)..(832): n is a, c, g, or t
  misc_feature (945)..(945): n is a, c, g, or t
  misc_feature (951)..(951): n is a, c, g, or t
  misc_feature (955)..(955): n is a, c, g, or t
  misc_feature (979)..(979): n is a, c, g, or t
  misc_feature (996)..(996): n is a, c, g, or t
  misc_feature (1033)..(1033): n is a, c, g, or t
  misc_feature (1035)..(1035): n is a, c, g, or t
  misc_feature (1038)..(1038): n is a, c, g, or t
  misc_feature (1048)..(1048): n is a, c, g, or t
  misc_feature (1050)..(1050): n is a, c, g, or t
  misc_feature (1058)..(1058): n is a, c, g, or t
  misc_feature (1063)..(1063): n is a, c, g, or t
  misc_feature (1070)..(1070): n is a, c, g, or t
  misc_feature (1078)..(1078): n is a, c, g, or t
  misc_feature (1089)..(1089): n is a, c, g, or t
  misc_feature (1091)..(1091): n is a, c, g, or t
  misc_feature (1095)..(1095): n is a, c, g, or t
  misc_feature (1098)..(1098): n is a, c, g, or t
  misc_feature (1100)..(1100): n is a, c, g, or t
  misc_feature (1103)..(1103): n is a, c, g, or t
  misc_feature (1105)..(1105): n is a, c, g, or t
  misc_feature (1109)..(1109): n is a, c, g, or t
  misc_feature (1119)..(1119): n is a, c, g, or t
  misc_feature (1128)..(1128): n is a, c, g, or t
  misc_feature (1131)..(1131): n is a, c, g, or t
  misc_feature (1137)..(1137): n is a, c, g, or t
tagagaaattactatgagaggatcgcatcaccatcaccatcacggatcctatttaggtgacactatagaatcgtcgacccacgcgtccggtggaaaagcctttgggtccaaatccactcttgttcgacaccagagaactcacacaggagaaaagccatatgagtgtggtgaatgtgggaaattattcagacaaagcttcagccttgttgtacaccagagaattcacactacagcaaggccttatgagtgtggccagtgtgggaaatcatttagcctaaagtgtggcctcattcagcaccagttaattcacagtggagctaggccctttgagtgtgatgagtgcggaaaatcctttagccaaagaaccaccctcaataaacaccacaaagttcacactgcagaaaggccttatgtatgtggggaatgtgggaaagcttttatgttcaaatctaaacttgttaggcaccagagaactcacactggagaaaggccttttgagtgcagtgaatgtgggaaattttttagacaaagctataccctcgttgaacaccagaaaattcacactggattaaggccttacgactgtggacagtgcgggaaatcctttatccaaaagtctagcctcattcaacaccaagtggttcacacaggagaaaggccatatgagtgtggcaaatgtgggaagtcctttacacaacactctggcctcattctccaccgaaaatctcacactgtggagaggcctcgtgacagcagcaaatgtggaaaaccctacagcccaagatctaacattgtttaactcttgaaactccaaacctgagaaaagccttanacctgcagggaatgtgccatgtcttcttcagtgttatggctatagagagcctttgtgaaggagccgtctgcctaaagttaaacctcatacttctagacctcccgatgggtcanactccnttanttccaggcatatgtgtctggcagnacccccttgcatgttcnaaactgctggaggcctttgccaaattaaatcattaancnccntgcatactangngaggcaanacccngggttcncccacccntggaggaaatncntgancancngancnttangggaattccntccctttcnganggatangcaa

SEQ ID NO: 321 - DNA, 867 bp, Homo Sapiens
  misc_feature (1)..(1): n is a, c, g, or t
  misc_feature (5)..(5): n is a, c, g, or t
  misc_feature (14)..(14): n is a, c, g, or t
  misc_feature (387)..(387): n is a, c, g, or t
  misc_feature (412)..(412): n is a, c, g, or t
  misc_feature (461)..(461): n is a, c, g, or t
  misc_feature (463)..(463): n is a, c, g, or t
  misc_feature (491)..(491): n is a, c, g, or t
  misc_feature (578)..(578): n is a, c, g, or t
  misc_feature (583)..(583): n is a, c, g, or t
  misc_feature (600)..(600): n is a, c, g, or t
  misc_feature (604)..(604): n is a, c, g, or t
  misc_feature (609)..(609): n is a, c, g, or t
  misc_feature (623)..(623): n is a, c, g, or t
  misc_feature (651)..(651): n is a, c, g, or t
  misc_feature (716)..(716): n is a, c, g, or t
  misc_feature (739)..(739): n is a, c, g, or t
  misc_feature (744)..(744): n is a, c, g, or t
  misc_feature (746)..(746): n is a, c, g, or t
  misc_feature (752)..(752): n is a, c, g, or t
  misc_feature (770)..(770): n is a, c, g, or t
  misc_feature (779)..(780): n is a, c, g, or t
  misc_feature (798)..(799): n is a, c, g, or t
  misc_feature (801)..(801): n is a, c, g, or t
  misc_feature (806)..(806): n is a, c, g, or t
  misc_feature (809)..(809): n is a, c, g, or t
  misc_feature (816)..(816): n is a, c, g, or t
  misc_feature (822)..(822): n is a, c, g, or t
  misc_feature (827)..(827): n is a, c, g, or t
  misc_feature (832)..(832): n is a, c, g, or t
  misc_feature (837)..(838): n is a, c, g, or t
  misc_feature (843)..(843): n is a, c, g, or t
  misc_feature (847)..(847): n is a, c, g, or t
  misc_feature (849)..(849): n is a, c, g, or t
  misc_feature (858)..(858): n is a, c, g, or t
  misc_feature (860)..(860): n is a, c, g, or t
  misc_feature (864)..(864): n is a, c, g, or t
ntaangagagaatnactatgagaggatcgcatcaccatcaccatcacggatcctatttaggtgacactatagaatcgtcgacccacgcgtccggcccccgccccgccggctcctctcgcccagcctcccgcctcgcgcctcccgcctcccgcctcccgcctccctccagctgcgagtgcggcctcggctggcggcggcaccaggccacagttgtaagggatcttgtggctgtcaggatggcagaggagcaggagttcacccagctctgcaagttgcctgcacagccctcacacccacactgcgtgaacaacacctaccgcagcgcacagcactcccaggctctgctccgagggctgctggctctccgggacagcggaatcctcttcnatgttgtgctggtggtggagggcanacacatcgaggcccatcgcatcctgctggctgcgtcctgcgattacttnanaggaatgtttgctgggggattgaagganatggaacaggaagaggtcctgatccacggtgtgtcctacaatgctatgtgccaaatcctacatttcatatacacctccgagctgganctcancctgagcaatgtacaanaganactgntggctgcctgccancttcaaatcccagaaattatccatttcngctgtgatttcctcatgtcctggggtgaacgaaaagaacattctcgaatgtctaccggctggcantagctgttttgactttgaaccgnctgantnaaacanactggacacctatattcnttcaaaaanntttgtggacttctctccnnanttganaanataaccntccagntttcnattgnaaaanntctantccncnccctcagtnancaanctg

SEQ ID NO: 322 - DNA, 1275 bp, Homo Sapiens
  misc_feature (877)..(877): n is a, c, g, or t
  misc_feature (925)..(925): n is a, c, g, or t
  misc_feature (950)..(950): n is a, c, g, or t
  misc_feature (953)..(953): n is a, c, g, or t
  misc_feature (956)..(956): n is a, c, g, or t
  misc_feature (987)..(987): n is a, c, g, or t
  misc_feature (994)..(994): n is a, c, g, or t
  misc_feature (996)..(996): n is a, c, g, or t
  misc_feature (1004)..(1004): n is a, c, g, or t
  misc_feature (1011)..(1011): n is a, c, g, or t
  misc_feature (1028)..(1028): n is a, c, g, or t
  misc_feature (1034)..(1034): n is a, c, g, or t
  misc_feature (1043)..(1043): n is a, c, g, or t
  misc_feature (1051)..(1051): n is a, c, g, or t
  misc_feature (1054)..(1054): n is a, c, g, or t
  misc_feature (1056)..(1056): n is a, c, g, or t
  misc_feature (1068)..(1068): n is a, c, g, or t
  misc_feature (1070)..(1070): n is a, c, g, or t
  misc_feature (1087)..(1087): n is a, c, g, or t
  misc_feature (1090)..(1090): n is a, c, g, or t
  misc_feature (1097)..(1098): n is a, c, g, or t
  misc_feature (1121)..(1123): n is a, c, g, or t
  misc_feature (1125)..(1125): n is a, c, g, or t
  misc_feature (1133)..(1133): n is a, c, g, or t
  misc_feature (1136)..(1136): n is a, c, g, or t
  misc_feature (1148)..(1148): n is a, c, g, or t
  misc_feature (1154)..(1154): n is a, c, g, or t
  misc_feature (1156)..(1156): n is a, c, g, or t
  misc_feature (1165)..(1165): n is a, c, g, or t
  misc_feature (1170)..(1170): n is a, c, g, or t
  misc_feature (1178)..(1178): n is a, c, g, or t
  misc_feature (1190)..(1190): n is a, c, g, or t
  misc_feature (1210)..(1210): n is a, c, g, or t
  misc_feature (1223)..(1223): n is a, c, g, or t
  misc_feature (1233)..(1233): n is a, c, g, or t
  misc_feature (1235)..(1235): n is a, c, g, or t
  misc_feature (1249)..(1250): n is a, c, g, or t
  misc_feature (1257)..(1257): n is a, c, g, or t
  misc_feature (1263)..(1264): n is a, c, g, or t
  misc_feature (1267)..(1267): n is a, c, g, or t
  misc_feature (1272)..(1275): n is a, c, g, or t
agaaattactatgagaggatcgcatcaccatcaccatcacggatcctatttaggtgacactatagaatcgtcgacccacgcgtccgcgccaactccggaggcgcggtgctcggcccgggagcgcgagcgggaggagcagagacccgcagccgggagcccgagcgcgggcgatgcaggctccgcgagcggcacctgcggctcctctaagctacgaccgtcgtctccgcggcagcagcgcgggccccagcagcctcggcagccacagccgctgcagccggggcagcctccgctgctgtcgcctcctctgatgcgcttgccctctcccggccccgggactccgggagaatgtgggtcctaggcatcgcggcaactttttgcggattgttcttgcttccaggctttgcgctgcaaatccagtgctaccagtgtgaagaattccagctgaacaacgactgctcctcccccgagttcattgtgaattgcacggtgaacgttcaagacatgtgtcagaaagaagtgatggagcaaagtgccgggatcatgtaccgcaagtcctgtgcatcatcagcggcctgtctcatcgcctctgccgggtaccagtccttctgctccccagggaaactgaactcagtttgcatcagctgctgcaacacccctctttgtaacgggccaaggcccaagaaaaggggaagttctgcctcggccctcaggccagggctccgcaccaccatcctgttcctcaaattagccctcttctcggcacactgctgaagctgaaggagatgccaccccctcctgcattgttcttccagccctcgcccccaaccccccacctccctgagtgagtttcttctgggtgtccttttattctgggtanggagcgggagtccgtgttctcttttgttcctgtgcaaataatgaaaanctcggtaaagcattctgaaaaaatncanctngactgaattttcagtatgtacttgaaggaangaggtgnantgaaagtnccccccntgtctgtgtaaccggantcaagncaggctggnaaaatcantcntnaaaatccctgangngggcatctgccttttgnaancctccanngtcattccctccctgaagggggnnnantttgaaantgnaaatgaaatgantttttntnagggtggangccanttcccacncaaggtcccccnttgaatttaaaattttggcnctgaaaaaatttnttgaaaaaantnggtggtttcccccnnaattggntttagnnccnaaacnnnn

SEQ ID NO: 323 - DNA, 1061 bp, Homo Sapiens
  misc_feature (4)..(5): n is a, c, g, or t
  misc_feature (15)..(15): n is a, c, g, or t
  misc_feature (782)..(782): n is a, c, g, or t
  misc_feature (821)..(821): n is a, c, g, or t
  misc_feature (861)..(861): n is a, c, g, or t
  misc_feature (873)..(873): n is a, c, g, or t
  misc_feature (877)..(877): n is a, c, g, or t
  misc_feature (893)..(893): n is a, c, g, or t
  misc_feature (895)..(895): n is a, c, g, or t
  misc_feature (900)..(900): n is a, c, g, or t
  misc_feature (906)..(906): n is a, c, g, or t
  misc_feature (908)..(908): n is a, c, g, or t
  misc_feature (916)..(916): n is a, c, g, or t
  misc_feature (922)..(922): n is a, c, g, or t
  misc_feature (929)..(929): n is a, c, g, or t
  misc_feature (931)..(931): n is a, c, g, or t
  misc_feature (938)..(938): n is a, c, g, or t
  misc_feature (944)..(944): n is a, c, g, or t
  misc_feature (952)..(952): n is a, c, g, or t
  misc_feature (961)..(962): n is a, c, g, or t
  misc_feature (965)..(965): n is a, c, g, or t
  misc_feature (968)..(968): n is a, c, g, or t
  misc_feature (972)..(972): n is a, c, g, or t
  misc_feature (974)..(974): n is a, c, g, or t
  misc_feature (981)..(981): n is a, c, g, or t
  misc_feature (987)..(987): n is a, c, g, or t
  misc_feature (1004)..(1004): n is a, c, g, or t
  misc_feature (1006)..(1006): n is a, c, g, or t
  misc_feature (1019)..(1019): n is a, c, g, or t
  misc_feature (1023)..(1023): n is a, c, g, or t
  misc_feature (1028)..(1029): n is a, c, g, or t
  misc_feature (1047)..(1047): n is a, c, g, or t
  misc_feature (1049)..(1049): n is a, c, g, or t
  misc_feature (1058)..(1058): n is a, c, g, or t
catnnagagagaatnactatgagaggatcgcatcaccatcaccatcacggatcctatttaggtgacactatagaatcgtcgacccacgcgtccgcggcgtggagatggcgggagctggtcgcggagcagcggtgtccagggtgcaggcgggtcctgggagtccccggcgagcgcgggggcggcagcaagtgcagccgctggggaagcagcgcccagccccgtggcccgggcttcgcagcaaagagaagaagaaagtgaactgcaagcccaagaaccaggacgaacaggagattcctttccggctccgggagattatgaggagccgccaagagatgaaaaacccgatcagtaacaagaagaggaagaaagcagcccaggtgaccttcagaaagacattggagaaggaagcaaagggagaggagcccgacatcgcagtccccaagttcaaacagaggaagggggagtccgacggggcctatatccaccgcatgcagcaagaggcccagcatgtgctgttcctcagcaagaaccaggccatccggcagccagaggtgcaggcagctcccaaggagaagtctgagcagaaaaaagcaaaaaaagcgttccagaagcggcgactagataaagtccgacggaaaaaggaggaaaaggcggcagacaggctggagcaggagttgctccgagacacggtgaagtttggtgaggttgtcctgcagcccccagagctgactgccaggccccagaggagcgtaagcaaggaccagcctggcaggagatcgcanatgctgcggatgcttctgagccccggtggtgtgtcccancctctgaccgcctccctggcccgccagcggaattgtggangaggaaaaaaancggnccgtgcaggcctacanancgttnaaacancngcagcacnactgcncggggancnaaccccncctcanttcccggnaaaaaaccnnaanccncacntntgattgnaaaaanaccccggggcctggccncnctttgggggcaantggnaccannaactgctacccctgggtnanaaaaaagcnggc

SEQ ID NO: 324 - DNA, 977 bp, Homo Sapiens
  misc_feature (2)..(2): n is a, c, g, or t
  misc_feature (14)..(14): n is a, c, g, or t
  misc_feature (778)..(778): n is a, c, g, or t
  misc_feature (816)..(816): n is a, c, g, or t
  misc_feature (821)..(821): n is a, c, g, or t
  misc_feature (880)..(880): n is a, c, g, or t
  misc_feature (889)..(889): n is a, c, g, or t
  misc_feature (891)..(891): n is a, c, g, or t
  misc_feature (902)..(902): n is a, c, g, or t
  misc_feature (929)..(929): n is a, c, g, or t
  misc_feature (931)..(931): n is a, c, g, or t
  misc_feature (933)..(933): n is a, c, g, or t
  misc_feature (946)..(946): n is a, c, g, or t
  misc_feature (951)..(951): n is a, c, g, or t
  misc_feature (955)..(955): n is a, c, g, or t
  misc_feature (957)..(958): n is a, c, g, or t
  misc_feature (962)..(962): n is a, c, g, or t
  misc_feature (968)..(969): n is a, c, g, or t
  misc_feature (973)..(973): n is a, c, g, or t
gnaattagagaganttactatgagaggatcgcatcaccattcaccatcacggatcctatttagggtgacactatagaatcgtcgacccacgcgtccgaagacgtccaacctgctgctgagccacgccggcatcctcaagcctcccacagcttcgcgggcactggccttcctgaacacctctcctggcgtcttaggaatactccacggccgtggacatgtggtcagtgggctgcatcttcggggagctgctgactcagaagcctctgttccccgggaattcggaaatcgatcagatcaacaaagtgttcaaggagctggggacccccagtgagaaaatctggcccggctacagtgagctcccagtagtcaagaagatgaccttcagcgagcacccctacaacaacctccgcaagcgcttcggggctctgctctcagaccagggcttcgacctcatgaacaagttcctgacctacttccccgggaggaggatcagcgctgaggacggcctcaagcatgagtatttccgcgagacccccctccccatcgacccctccatgttccccacgtggcccgccaagagcgagcagcagcgtgtgaagcggggcaccagcccgaggccccctgagggaggcctgggctacagccagctgggtgacgacgacctgaaggagacgggcttccaccttaccaccacgaaccagggggcctctgccgcgggccccggcttcagcctcaagttctgaaggtcagagtggaccccgtcatggggagaactcanccgggaaccacaggcgtggctactgcggctggactgcnatganactcggaaactcctcgtcttacttttgtgctccatgttttgtttttgaattttggtttngaaaatttngnaaaatttaaantcattttccttgttgtggaaggaaaanancntgtgttttcttcntgaanttgncnngggnatcttnngggngccc

SEQ ID NO: 325 - DNA, 1179 bp, Homo Sapiens
  misc_feature (1)..(1): n is a, c, g, or t
  misc_feature (235)..(235): n is a, c, g, or t
  misc_feature (461)..(461): n is a, c, g, or t
  misc_feature (529)..(529): n is a, c, g, or t
  misc_feature (834)..(834): n is a, c, g, or t
  misc_feature (852)..(852): n is a, c, g, or t
  misc_feature (859)..(859): n is a, c, g, or t
  misc_feature (862)..(862): n is a, c, g, or t
  misc_feature (874)..(874): n is a, c, g, or t
  misc_feature (890)..(890): n is a, c, g, or t
  misc_feature (897)..(897): n is a, c, g, or t
  misc_feature (907)..(907): n is a, c, g, or t
  misc_feature (911)..(911): n is a, c, g, or t
  misc_feature (915)..(915): n is a, c, g, or t
  misc_feature (928)..(928): n is a, c, g, or t
  misc_feature (946)..(947): n is a, c, g, or t
  misc_feature (949)..(949): n is a, c, g, or t
  misc_feature (958)..(958): n is a, c, g, or t
  misc_feature (967)..(967): n is a, c, g, or t
  misc_feature (975)..(976): n is a, c, g, or t
  misc_feature (985)..(985): n is a, c, g, or t
  misc_feature (1001)..(1001): n is a, c, g, or t
  misc_feature (1004)..(1004): n is a, c, g, or t
  misc_feature (1019)..(1019): n is a, c, g, or t
  misc_feature (1029)..(1029): n is a, c, g, or t
  misc_feature (1032)..(1032): n is a, c, g, or t
  misc_feature (1037)..(1037): n is a, c, g, or t
  misc_feature (1045)..(1045): n is a, c, g, or t
  misc_feature (1064)..(1064): n is a, c, g, or t
  misc_feature (1070)..(1070): n is a, c, g, or t
  misc_feature (1079)..(1079): n is a, c, g, or t
  misc_feature (1086)..(1086): n is a, c, g, or t
  misc_feature (1088)..(1088): n is a, c, g, or t
  misc_feature (1121)..(1121): n is a, c, g, or t
  misc_feature (1124)..(1124): n is a, c, g, or t
  misc_feature (1126)..(1126): n is a, c, g, or t
  misc_feature (1131)..(1132): n is a, c, g, or t
  misc_feature (1137)..(1137): n is a, c, g, or t
  misc_feature (1154)..(1154): n is a, c, g, or t
  misc_feature (1165)..(1165): n is a, c, g, or t
  misc_feature (1173)..(1173): n is a, c, g, or t
naaatagagagaattactatgagaggatcgcatcaccatcaccatcacggatcctatttaggtgacactatagaatcgtcgacccacgcgtccgcccacgcgtccgcccacgcgtccgcccacgcgtccggaggaataggaatcatggcggctgcgctgttcgtgctgctgggattcgcgctgctgggcacccacggagcctccggggctgccggcacagtcttcactaccgtanaagaccttggctccaagatactcctcacctgctccttgaatgacagcgccacagaggtcacagggcaccgctggctgaaggggggcgtggtgctgaaggaggacgcgctgcccggccagaaaacggagttcaaggtggactccgacgaccagtggggagagtactcctgcgtcttcctccccgagcccatgggcacggccaacatccagctccacgggcctcccanagtgaaggccgtgaagtcgtcagaacacatcaacgagggggagacggccatgctggtctgcaagtcanagtccgtgccacctgtcactgactgggcctggtacaagatcactgactctgaggacaaggccctcatgaacggctccgagagcaggttcttcgtgagttcctcgcagggccggtcagagctacacattgagaacctgaacatggaggccgaccccggccagtaccggtgcaacggcaccagctccaagggctccgaccaggccatcatcacgctccgcgtgcgcagccacctggccgccctctggcccttcctgggcatcgtggctgaggtgctggtgctggtcaccatcatcttcatctacganaagcgccggaagcccgangacgtcntgnatgatgacgacnccggctctgcaccccntgaaaancaccgggcancacnaaantgacaaggcaaanaacgtccgccaaaagaanntnttccttgangcaggtggnccgaagannctcccttgnttcgcgttttgcgccnccnccggaaatccactcncagtgcttgnaanattcnaagttctnccctcttaaaaaaaacccnccccgnaaaattccnatcatananttctttttttttaaaaaaattgggttttttccnttnanaattnntttcnttaaaaatttttttttntgaaattttcnaaaaaccnggaaat

SEQ ID NO: 326 - DNA, 925 bp, Homo Sapiens
tgagaggatcgcatcaccatcaccatcacggatcctatttaggtgacactatagaatcgtcgacccacgcgtccgaggatgcctgcgagcatctggcggagtacttggaagcctattggaaggccacacacccgcccagcagcacgccacccaatccgctgctgaaccgcaccatggctaccgcagccctggctgccagccctgcccctgtctccaacctccagggaccctaccttgcttccggggaccagccactggaacgggccaccggggagcacgccagcatgcacgagtacccaggggagctgggccagcccccaggcctttaccccagcagccacccaccaggccgggcaggcacgctacgggcactgtcccgccaagacacttttgatgccgacacccccggcagccgaaactctgcctacacggagctgggagactcatgtgtggacatggagactgacccctcagaggggccagggcttggagaccctgcagggggcggcacgcccccagcccgacagggatcctgggaggacgaggaagaagactatgaggaagagctgaccgacaaccggaaccggggccggaataaggcccgctactgcgctgagggtgggggtccagttttggggcgcaacaagaatgagctggagggctggggacgaggcgtctacattcgctgagaggcaggggccacacggcgggaggaagggctctgagcccaggggaggggagggagcgaggggctcacacctgacatgtattcgcctccagggggcgctgtctccctcctttcagatgcctttgctcaaagcttggggtttctttggtgttaccatcccagctcccgggaggcccttaagccccagctgtcggtttttacctgcctgttgtggatggatgggggatacccaccttt

SEQ ID NO: 327 - DNA, 1211 bp, Homo Sapiens
  misc_feature (734)..(734): n is a, c, g, or t
  misc_feature (849)..(849): n is a, c, g, or t
  misc_feature (869)..(869): n is a, c, g, or t
  misc_feature (909)..(909): n is a, c, g, or t
  misc_feature (920)..(920): n is a, c, g, or t
  misc_feature (934)..(934): n is a, c, g, or t
  misc_feature (937)..(937): n is a, c, g, or t
  misc_feature (957)..(957): n is a, c, g, or t
  misc_feature (964)..(964): n is a, c, g, or t
  misc_feature (982)..(982): n is a, c, g, or t
  misc_feature (990)..(990): n is a, c, g, or t
  misc_feature (996)..(996): n is a, c, g, or t
  misc_feature (1031)..(1031): n is a, c, g, or t
  misc_feature (1042)..(1042): n is a, c, g, or t
  misc_feature (1060)..(1062): n is a, c, g, or t
  misc_feature (1065)..(1065): n is a, c, g, or t
  misc_feature (1075)..(1076): n is a, c, g, or t
  misc_feature (1093)..(1093): n is a, c, g, or t
  misc_feature (1100)..(1100): n is a, c, g, or t
  misc_feature (1116)..(1116): n is a, c, g, or t
  misc_feature (1118)..(1118): n is a, c, g, or t
  misc_feature (1130)..(1130): n is a, c, g, or t
  misc_feature (1132)..(1132): n is a, c, g, or t
  misc_feature (1141)..(1141): n is a, c, g, or t
  misc_feature (1145)..(1145): n is a, c, g, or t
  misc_feature (1149)..(1149): n is a, c, g, or t
  misc_feature (1165)..(1165): n is a, c, g, or t
  misc_feature (1171)..(1171): n is a, c, g, or t
  misc_feature (1173)..(1173): n is a, c, g, or t
  misc_feature (1183)..(1183): n is a, c, g, or t
  misc_feature (1191)..(1191): n is a, c, g, or t
  misc_feature (1194)..(1194): n is a, c, g, or t
  misc_feature (1196)..(1200): n is a, c, g, or t
  misc_feature (1202)..(1202): n is a, c, g, or t
  misc_feature (1211)..(1211): n is a, c, g, or t
attagagagattactatgagaggatcgcatcaccatcaccatcacggatcctatttaggtgacactatagaatcgtcgacccacgcgtccgggaacatgctgaaattcggtgcagcccggaatcccgaggatgtggaccgggagcggcgagaacacgaacgcgaggagaggatggggcagctacgggggtccgcgacccgagccctgccccctggcccacccacgggggccactgccaaccggctccgcagtgccgccgagcccgtggcttccacgccagcctcccgcatccagccggctggcaatacttctcccagagcgatctcgcgggtcgaccgggagaggaaggtgagtatgaggctgcacaggggtgcgcccgccaacgtctcctcctcagacctcactgggcggcaagaggtctcccggatcccagcctcacaggtgagctgcccccctgccagtccctctgggcctcagaactgagttagagaccccccagtgggaggtcaggccgtggctctgttcttccctttccatcgacgctgcttgccttggagtgaaccccttctgttgagccaggacttggcctcatttaatcctctgaggtctgatgagccctcttgagcaaagtcattcaccaaggctcagggcagtaacattccctggcaagtggcacagctgggctccagtcctcgctgccaggggcccagccagggtgggcagcaggggctcanagatgaggtgttgctgctccctgacatcagggagcccccaggagcccctgtgagcattggcaagagcatggggtgtaggggcagtgaggtcccatcctctttggggctatgtttnggatggggacacttgggaanggggaatctgtagttgcccagggcaggtggcctggcaaangtgggtggganccctgccctcgtcntcntgcctgtgggcaagaaggantcctgcnaaaaaaacctcattggcnatctactnaggtancaggtttgcctccttgggcaaatttttaactacanaaagggaaatnttaaaattcctggaatcnnnagncttccctcannttgagggcttcctggangtggggngggggttaaccttccncntgggaaaaattncnaattttttnccanggtnagggaattgattgaanttgaantnctttttttcntccctttnctncnnnnntnaaaaaaaan

SEQ ID NO: 328 - DNA, 1315 bp, Homo Sapiens
  misc_feature (824)..(824): n is a, c, g, or t
  misc_feature (828)..(828): n is a, c, g, or t
  misc_feature (839)..(839): n is a, c, g, or t
  misc_feature (842)..(842): n is a, c, g, or t
  misc_feature (881)..(881): n is a, c, g, or t
  misc_feature (902)..(902): n is a, c, g, or t
  misc_feature (968)..(968): n is a, c, g, or t
  misc_feature (972)..(972): n is a, c, g, or t
  misc_feature (977)..(977): n is a, c, g, or t
  misc_feature (979)..(979): n is a, c, g, or t
  misc_feature (981)..(981): n is a, c, g, or t
  misc_feature (988)..(988): n is a, c, g, or t
  misc_feature (1012)..(1012): n is a, c, g, or t
  misc_feature (1014)..(1014): n is a, c, g, or t
  misc_feature (1017)..(1018): n is a, c, g, or t
  misc_feature (1032)..(1032): n is a, c, g, or t
  misc_feature (1048)..(1048): n is a, c, g, or t
  misc_feature (1054)..(1054): n is a, c, g, or t
  misc_feature (1059)..(1059): n is a, c, g, or t
  misc_feature (1083)..(1083): n is a, c, g, or t
  misc_feature (1090)..(1090): n is a, c, g, or t
  misc_feature (1093)..(1093): n is a, c, g, or t
  misc_feature (1101)..(1101): n is a, c, g, or t
  misc_feature (1105)..(1105): n is a, c, g, or t
  misc_feature (1109)..(1109): n is a, c, g, or t
  misc_feature (1112)..(1112): n is a, c, g, or t
  misc_feature (1134)..(1134): n is a, c, g, or t
  misc_feature (1136)..(1136): n is a, c, g, or t
  misc_feature (1140)..(1140): n is a, c, g, or t
  misc_feature (1148)..(1149): n is a, c, g, or t
  misc_feature (1156)..(1156): n is a, c, g, or t
  misc_feature (1184)..(1184): n is a, c, g, or t
  misc_feature (1187)..(1187): n is a, c, g, or t
  misc_feature (1192)..(1192): n is a, c, g, or t
  misc_feature (1210)..(1210): n is a, c, g, or t
  misc_feature (1212)..(1212): n is a, c, g, or t
  misc_feature (1218)..(1218): n is a, c, g, or t
  misc_feature (1224)..(1225): n is a, c, g, or t
  misc_feature (1229)..(1229): n is a, c, g, or t
  misc_feature (1237)..(1237): n is a, c, g, or t
  misc_feature (1241)..(1241): n is a, c, g, or t
  misc_feature (1245)..(1246): n is a, c, g, or t
  misc_feature (1252)..(1252): n is a, c, g, or t
  misc_feature (1304)..(1304): n is a, c, g, or t
  misc_feature (1306)..(1306): n is a, c, g, or t
  misc_feature (1311)..(1311): n is a, c, g, or t
agagaaaattactatgagaggatcgcatcaccatcaccatcacggatcctatttaggtgacactatagaatcgtcgacccacgcgtccggagcagcggcggcggcgcggagagacgcagcggaggttttcctggtttcggaccccagcggccggatggtgaaatcctccctgcagcggatcctcaatagccactgcttcgccagagagaaggaaggggataaacccagcgccaccatccacgccagccgcaccatgccgctcctaagcctgcacagccgcggcggcagcagcagtgagagttccagggtctccctccactgctgtagtaacccgggtccggggcctcggtggtgctcctgatgcccctcacccacccctgaagatcccaggtgggcgagggaatagtcagagggatcacaatctttcagctaacttattctactccgatgatcggctgaatgtaacagaggaactaacgtccaacgacaagacgaggattctcaacgtccagtccaggctcacagacgccaaacgcattaactggcgaacagtgctgagtggcggcagcctctacatcgagatcccgggcggcgcgctgcccgaggggagcaaggacagctttgcagttctcctggagttcgctgaggagcagctgcgagccgaccatgtcttcatttgcttccacaagaaccgcgaggacagagccgccttgctccgaaccttcagctttttgggctttgagattgtgagaccggggcatccccttgtccccaagagacccgacgcttgcttcatggcctacacgttcgagagagagtcttcngganaagaggaagantanggccgcctcggggctgggcatccggccccctggggccanccccttgtcagccgggtgggntagaaaccgtaaactccctcatctcgcctggggtttgtccgcatgttgtaatcgtgcaaataaacnctcnctccnantnagcggtnttatttcttgaaattaaaaattgngnttnnggaaactgaaaatnttgctttaattctaanaaaaanttttntttttaaaaaaaaaaaaaaggggngcccccnccntaaaggangccnaatnaancttaattagctgaacttggacncngttnaaaaatcnnaaatganccccaaactcccttggattttttcaaanccncggtncccccgggggtttttttngngaaatnaacttnnttgngaattttntggnccanngaactnaagggaaaaaacccgggaatccccgttaattccagggcccaaaaaattttgngnttttnattt

SEQ ID NO: 329 - DNA, 1130 bp, Homo Sapiens
  misc_feature (1)..(1): n is a, c, g, or t
  misc_feature (904)..(904): n is a, c, g, or t
  misc_feature (925)..(925): n is a, c, g, or t
  misc_feature (951)..(951): n is a, c, g, or t
  misc_feature (967)..(967): n is a, c, g, or t
  misc_feature (970)..(970): n is a, c, g, or t
  misc_feature (976)..(976): n is a, c, g, or t
  misc_feature (1000)..(1000): n is a, c, g, or t
  misc_feature (1012)..(1012): n is a, c, g, or t
  misc_feature (1015)..(1015): n is a, c, g, or t
  misc_feature (1019)..(1019): n is a, c, g, or t
  misc_feature (1021)..(1022): n is a, c, g, or t
  misc_feature (1030)..(1030): n is a, c, g, or t
  misc_feature (1033)..(1033): n is a, c, g, or t
  misc_feature (1036)..(1036): n is a, c, g, or t
  misc_feature (1046)..(1046): n is a, c, g, or t
  misc_feature (1068)..(1068): n is a, c, g, or t
  misc_feature (1071)..(1071): n is a, c, g, or t
  misc_feature (1078)..(1078): n is a, c, g, or t
  misc_feature (1080)..(1080): n is a, c, g, or t
  misc_feature (1083)..(1083): n is a, c, g, or t
  misc_feature (1088)..(1088): n is a, c, g, or t
  misc_feature (1094)..(1094): n is a, c, g, or t
  misc_feature (1103)..(1104): n is a, c, g, or t
  misc_feature (1114)..(1114): n is a, c, g, or t
naattagagaaattactatgagaggatcgcatcaccatcaccatcacggatcctatttaggtgacactatagaatcgtcgacccacgcgtccgcccacgcgtccgatgatggcaaactcacagatccttctaagacaagcaacactatccgtgttttcttgccgaacaagcaaagaacagtggtcaatgtgcgaaatggaatgagcttgcatgactgccttatgaaagcactcaaggtgaggggcctgcaaccagagtgctgtgcagtgttcagacttctccacgaacacaaaggtaaaaaagcacgcttagattggaatactgatgctgcgtctttgattggagaagaacttcaagtagatttcctggatcatgttcccctcacaacacacaactttgctcggaagacgttcctgaagcttgccttctgtgacatctgtcagaaattcctgctcaatggatttcgatgtcagacttgtggctacaaatttcatgagcactgtagcaccaaagtacctactatgtgtgtggactggagtaacatcagacaactcttattgtttccaaattccactattggtgatagtggagtcccagcactaccttctttgactatgcgtcgtatgcgagagtctgtttccaggatgcctgttagttctcagcacagatattctacacctcacgccttcacctttaacacctccagtccctcatctgaaggttccctctcccagaggcagaggtcgacatccacacctaatgtccacatggtcagcaccaccctgcctgtggacagcaggatgattgaggatgcaattcgaagtcacagcgaatcagcctcaccttcagcccctgtccagtagccccaacaatctgagcccaacaggctggtcacagccgaaancccccgtgccagcacaaaaanagcggggcaccagtatctggggaccnaggaaaaaaaaaaatnagncctcgnggacagaaaaatccagctattatngggaaaaaaaanccngtgnanngatgctgnccnccngattgggccngctcttttggaactgtttaaanggnaaatggncnggnaaatnttgccntaaaaatcnnaaggtttccnacccaccccaaaaaat

SEQ ID NO: 330 - DNA, 1026 bp, Homo Sapiens
  misc_feature (1)..(2): n is a, c, g, or t
  misc_feature (4)..(4): n is a, c, g, or t
  misc_feature (759)..(760): n is a, c, g, or t
  misc_feature (766)..(768): n is a, c, g, or t
  misc_feature (774)..(774): n is a, c, g, or t
  misc_feature (781)..(782): n is a, c, g, or t
  misc_feature (784)..(784): n is a, c, g, or t
  misc_feature (786)..(788): n is a, c, g, or t
  misc_feature (842)..(842): n is a, c, g, or t
  misc_feature (861)..(861): n is a, c, g, or t
  misc_feature (889)..(889): n is a, c, g, or t
  misc_feature (939)..(939): n is a, c, g, or t
  misc_feature (974)..(974): n is a, c, g, or t
  misc_feature (979)..(979): n is a, c, g, or t
  misc_feature (1013)..(1013): n is a, c, g, or t
  misc_feature (1017)..(1017): n is a, c, g, or t
nnantagagaaattactatgagaggatcgcatcaccatcaccatcacggatcctatttaggtgacactatagaatcgtcgacccacgcgtccgcggacgcgtgggcggcgctcggcaagttctcccaggagaaagccatgttcagttcgagcgccaagatcgtgaagcccaatggcgagaagccggacgagttcgagtccggcatctcccaggctcttctggagctggagatgaactcggacctcaaggctcagctcagggagctgaatattacggcagctaaggaaattgaagttggtggtggtcggaaagctatcataatctttgttcccgttcctcaactgaaatctttccagaaaatccaagtccggctagtacgcgaattggagaaaaagttcagtgggaagcatgtcgtctttatcgctcagaggagaattctgcctaagccaactcgaaaaagccgtacaaaaaataagcaaaagcgtcccaggagccgtactctgacagctgtgcacgatgccatccttgaggacttggtcttcccaagcgaaattgtgggcaagagaatccgcgtcaaactagatggcagccggctcataaaggttcatttggacaaagcacagcagaacaatgtggaacacaaggttgaaactttttctggtgtctataagaagctcacgggcaaggatgttaattttgaattcccagagtttcaattgtaaacaaaaatgactaaataaaaagtatatattcacaaannacaaannnaaacanaataaannanannnaaaaaaagggcggccgctccctatagtgagtcgtattaagcttaattagctganccttggactcctgttgaanaatccagtaatgacctcaaaactccatntggatttgttcaaaaaccctcggttgccccccgggcgtttttttatgggngaaaaatccaagcctagcttgggcgaaattttccnggaantagggaacctaaaatgggaaaaaaaatccctggnaaanacccccgtt

SEQ ID NO: 331 - DNA, 656 bp, Homo Sapiens
agagagattactatgagaggatcgcatcaccatcaccatcacggatcctatttaggtgacactatagaatcgtcgacccacgcgtccgcggaccctgcagccgcagagatgttgatgcctaagaagaaccggattgccatttatgaactcctttttaaggagggagtcatggtggccaagaaggatgtccacatgcctaagcacccggagctggcagacaagaatgtgcccaaccttcatgtcatgaaggccatgcagtctctcaagtcccgaggctacgtgaaggaacagtttgcctggagacatttctactggtaccttaccaatgagggtatccagtatctccgtgattaccttcatctgcccccggagattgtgcctgccaccctacgccgtagccgtccagagactggcaggcctcggcctaaaggtctggagggtgagcgacctgcgagactcacaagaggggaagctgacagagatacctacagacggagtgctgtgccacctggtgccgacaagaaagccgaggctggggctgggtcagcaaccgaattccagtttagaggcggatttggtcgtggacgtggtcagccacctcagtaaaattggagaggattcttttgcattgaataaacttacagccaaaaaacctt

SEQ ID NO: 332 - DNA, 988 bp, Homo Sapiens
  misc_feature (748)..(748): n is a, c, g, or t
  misc_feature (790)..(790): n is a, c, g, or t
  misc_feature (799)..(799): n is a, c, g, or t
  misc_feature (808)..(808): n is a, c, g, or t
  misc_feature (835)..(835): n is a, c, g, or t
  misc_feature (853)..(853): n is a, c, g, or t
  misc_feature (860)..(860): n is a, c, g, or t
  misc_feature (864)..(864): n is a, c, g, or t
  misc_feature (870)..(870): n is a, c, g, or t
  misc_feature (881)..(881): n is a, c, g, or t
  misc_feature (885)..(885): n is a, c, g, or t
  misc_feature (895)..(895): n is a, c, g, or t
  misc_feature (931)..(931): n is a, c, g, or t
  misc_feature (935)..(935): n is a, c, g, or t
  misc_feature (943)..(943): n is a, c, g, or t
  misc_feature (946)..(946): n is a, c, g, or t
  misc_feature (949)..(950): n is a, c, g, or t
  misc_feature (958)..(958): n is a, c, g, or t
  misc_feature (961)..(961): n is a, c, g, or t
  misc_feature (963)..(963): n is a, c, g, or t
  misc_feature (966)..(967): n is a, c, g, or t
  misc_feature (971)..(971): n is a, c, g, or t
  misc_feature (983)..(983): n is a, c, g, or t
  misc_feature (986)..(986): n is a, c, g, or t
tagagaaattactatgagaggatcgcatcaccatcaccatcacggatcctatttaggtgacactatagaatcgtcgacccacgcgtccgccgagctgttcgccaagcgcgcctaccgcgagctgcgcctgctcaagcacatgcgccacgagaacgtgatcgggctgctggacgtattcactcctgatgagaccctggatgacttcacggacttttacctggtgatgccgttcatgggcaccgacctgggcaagctcatgaaacatgagaagctaggcgaggaccggatccagttcctcgtgtaccagatgctgaaggggctgaggtatatccacgctgccggcatcatccacagagtgagtcccggtggagaagccgctcatcagccctcccccagtgcaatccccccgcctccacgtcccacctgtgaggatgtgatggggtctgggggctgagccacgccctatgcacagcccctggtgggaacctgcctgggtgcccaggacctgaagcccggcaacctggctgtgaacgaagactgtgagctgaagatcctggacttcggcctggccaggcaggcagacagtgagatgactgggtacgtggtgacccggtggtaccgggctcccgaggtcatcttgaattggatgcgctacacgcagacggtggacatctggtccgtgggctgcatcatggcggagatgatcacaggcaagacgctgttcaagggcagcgaccacctggaccanctgaaggagatcatgaaggtgacggggacgcctccggctgantttgtgcancggctgcanagcgatgaggccaaaaactacatgaangggcctccccgaaattgnaaaaaanaagnattttngcctctaatcntgancaatggcaanccctctggctgtgaacctcctgaaaaaaatgctggngctngaacccgnaancanngggtgaanggnanggnnaagnccttggcccatnccnta

SEQ ID NO: 333 - DNA, 1179 bp, Homo Sapiens
  misc_feature (15)..(15): n is a, c, g, or t
  misc_feature (849)..(849): n is a, c, g, or t
  misc_feature (868)..(868): n is a, c, g, or t
  misc_feature (965)..(965): n is a, c, g, or t
  misc_feature (982)..(982): n is a, c, g, or t
  misc_feature (987)..(987): n is a, c, g, or t
  misc_feature (989)..(989): n is a, c, g, or t
  misc_feature (993)..(993): n is a, c, g, or t
  misc_feature (995)..(995): n is a, c, g, or t
  misc_feature (1004)..(1004): n is a, c, g, or t
  misc_feature (1010)..(1010): n is a, c, g, or t
  misc_feature (1034)..(1034): n is a, c, g, or t
  misc_feature (1044)..(1044): n is a, c, g, or t
  misc_feature (1052)..(1052): n is a, c, g, or t
  misc_feature (1073)..(1073): n is a, c, g, or t
  misc_feature (1079)..(1079): n is a, c, g, or t
  misc_feature (1088)..(1088): n is a, c, g, or t
  misc_feature (1109)..(1109): n is a, c, g, or t
  misc_feature (1111)..(1111): n is a, c, g, or t
  misc_feature (1113)..(1113): n is a, c, g, or t
  misc_feature (1129)..(1129): n is a, c, g, or t
  misc_feature (1132)..(1132): n is a, c, g, or t
  misc_feature (1138)..(1138): n is a, c, g, or t
  misc_feature (1148)..(1148): n is a, c, g, or t
  misc_feature (1150)..(1150): n is a, c, g, or t
  misc_feature (1159)..(1159): n is a, c, g, or t
  misc_feature (1163)..(1163): n is a, c, g, or t
  misc_feature (1166)..(1166): n is a, c, g, or t
aattagagaaattanctatgagaggatcgcatcaccatcaccatcacggatcctatttaggtgacactatagaatcgtcgacccacgcgtccggacgcatcaaagttgactttgtgatccctaaagaacttccctttggagacaaagatacgaaatccaaggtgaccctgctggaaggtgaccatgttaggtttaatatttcaacagaccgacgtgacaaattagagcgagcaaccaatatagaagttctgtcaaatacatttcagttcactaatgaagcccgagaaatgggtgtgattgctgccatgagagatggttttggtttcatcaagtgtgtggatcgtgatgttcgtatgttcttccacttcagtgaaattctggatgggaaccagctccatattgcagatgaagtagagtttactgtggttcctgatatgctctctgctcaaagaaatcatgctattaggattaaaaaacttcccaagggcacggtttcatttcattcccattcagatcaccgttttctgggcacggtagaaaaagaagccactttttccaatcctaaaaccactagcccaaataaaggcaaagagaaggaggctgaggatggcattattgcttatgatgactgtggggtgaaactgactattgcttttcaagccaaggatgtggaaggatctacttctcctcaaataggagataaggttgaatttagtattagtgacaaacagaggcctggacagcaggttgcaacttgtgtgcgacttttaggtcgtaattctaactccaagaggctcttgggttatgtggcaactctgaaggataattttggatttattgaaacagccnatcatgataaggaaaatcnttttccattacagtgagttctctggtgatgttgatagcctggaactggggggacatggtcgagtatagcttgtccaaaggcaaaggcaccaaagtcngtgcaaaaaagtgaacnaaacncnctcngngatggcatnactgangaagctgatccccccatttactcnggcaaagtantccccccngaggagggtggatccaccccnactggntacccaggnatgattgaaatggggagaggncnanttgaaagggaggccanccnttggcnccttggaagncnacaagggantgcngcnaaagggaacccca

SEQ ID NO: 334 - DNA, 1124 bp, Homo Sapiens
  misc_feature (814)..(814): n is a, c, g, or t
  misc_feature (873)..(873): n is a, c, g, or t
  misc_feature (884)..(884): n is a, c, g, or t
  misc_feature (887)..(887): n is a, c, g, or t
  misc_feature (905)..(905): n is a, c, g, or t
  misc_feature (931)..(931): n is a, c, g, or t
  misc_feature (978)..(978): n is a, c, g, or t
  misc_feature (996)..(996): n is a, c, g, or t
  misc_feature (999)..(999): n is a, c, g, or t
  misc_feature (1011)..(1011): n is a, c, g, or t
  misc_feature (1020)..(1020): n is a, c, g, or t
  misc_feature (1029)..(1029): n is a, c, g, or t
  misc_feature (1035)..(1035): n is a, c, g, or t
  misc_feature (1043)..(1044): n is a, c, g, or t
  misc_feature (1046)..(1046): n is a, c, g, or t
  misc_feature (1059)..(1059): n is a, c, g, or t
  misc_feature (1062)..(1064): n is a, c, g, or t
  misc_feature (1076)..(1078): n is a, c, g, or t
  misc_feature (1086)..(1086): n is a, c, g, or t
  misc_feature (1097)..(1097): n is a, c, g, or t
  misc_feature (1105)..(1105): n is a, c, g, or t
  misc_feature (1107)..(1108): n is a, c, g, or t
  misc_feature (1114)..(1114): n is a, c, g, or t
  misc_feature (1118)..(1119): n is a, c, g, or t
agaaattaactatgagaggatcgcatcaccatcaccatcacggatcctatttaggtgacactatagaatcgtcgacccacgcgtccgctgcagggcgccggtctgggtaccaatgcctcgttggcccagatggtgagcggccttgtggggcagcttcttatgcagccagtccttgtggctcaggggaccccaggtatggctccaccgccagcccctgccactgcttctgccagtgctggcaccaccaacacagctaccacagctggccccgctcctggggggcctgcccagcctccacccacccctcaaccctccatggctgatcttcagttctctcagcttctggggaacctgctagggcctgcagggccaggggctggagggcctggtgtggcttctcccaccatcactgtggcgatgcctggtgtccctgcctttctccaaggcatgactgacttcttgcaggcaacacagacagcccctccaccacccccacctcctccacccccaccacctgccccagagcagcagaccatgcccccaccaggctccccttctggtggcgcagggagtcctggaggcctgggtcttgagagcctgtcaccggagttttttacctcagtggtgcagggtgtgctcagctccctgctgggctccctgggggctcgggctggcagcagtgaaagtattgctgccttcatacaacgcctcagtggatccagcaacatctttgagcctggagctgatggggcccttggattctttggggccttgctttctcttctgtgccagaacttctctatggtggacgtantgatgcttctccatgggcatttccagccactacaacggctccagccccagctgcgatcnttcttccacancantacctgggtggtcaggancccacacccagtaacatccggatggnaacccacacatttgatcacggggctaaaaaaatatgtgcgggaaaanttttccttggtgcaggtncanccaggtgtgganatcatccgnaaaacctgnaatttntccaaaannantttaaaaaaatgntgnnnatgtgctgcatnnnaaaaaaanggaatttgggnccggttgntnnaatttntaannaaagc

SEQ ID NO: 335 - DNA, 1362 bp, Homo Sapiens
  misc_feature (848)..(848): n is a, c, g, or t
  misc_feature (881)..(881): n is a, c, g, or t
  misc_feature (908)..(908): n is a, c, g, or t
  misc_feature (917)..(917): n is a, c, g, or t
  misc_feature (927)..(927): n is a, c, g, or t
  misc_feature (934)..(934): n is a, c, g, or t
  misc_feature (961)..(961): n is a, c, g, or t
  misc_feature (964)..(964): n is a, c, g, or t
  misc_feature (977)..(977): n is a, c, g, or t
  misc_feature (1012)..(1012): n is a, c, g, or t
  misc_feature (1015)..(1015): n is a, c, g, or t
  misc_feature (1020)..(1020): n is a, c, g, or t
  misc_feature (1028)..(1028): n is a, c, g, or t
  misc_feature (1036)..(1036): n is a, c, g, or t
  misc_feature (1040)..(1040): n is a, c, g, or t
  misc_feature (1047)..(1048): n is a, c, g, or t
  misc_feature (1062)..(1062): n is a, c, g, or t
  misc_feature (1073)..(1073): n is a, c, g, or t
  misc_feature (1078)..(1078): n is a, c, g, or t
  misc_feature (1080)..(1080): n is a, c, g, or t
  misc_feature (1111)..(1112): n is a, c, g, or t
  misc_feature (1116)..(1116): n is a, c, g, or t
  misc_feature (1123)..(1123): n is a, c, g, or t
  misc_feature (1148)..(1149): n is a, c, g, or t
  misc_feature (1155)..(1155): n is a, c, g, or t
  misc_feature (1165)..(1165): n is a, c, g, or t
  misc_feature (1177)..(1177): n is a, c, g, or t
  misc_feature (1185)..(1185): n is a, c, g, or t
  misc_feature (1190)..(1190): n is a, c, g, or t
  misc_feature (1201)..(1201): n is a, c, g, or t
  misc_feature (1203)..(1203): n is a, c, g, or t
  misc_feature (1206)..(1206): n is a, c, g, or t
  misc_feature (1211)..(1211): n is a, c, g, or t
  misc_feature (1215)..(1215): n is a, c, g, or t
  misc_feature (1233)..(1233): n is a, c, g, or t
  misc_feature (1238)..(1238): n is a, c, g, or t
  misc_feature (1244)..(1244): n is a, c, g, or t
  misc_feature (1251)..(1251): n is a, c, g, or t
  misc_feature (1257)..(1257): n is a, c, g, or t
  misc_feature (1272)..(1272): n is a, c, g, or t
  misc_feature (1294)..(1294): n is a, c, g, or t
  misc_feature (1302)..(1303): n is a, c, g, or t
  misc_feature (1307)..(1307): n is a, c, g, or t
  misc_feature (1309)..(1309): n is a, c, g, or t
  misc_feature (1312)..(1312): n is a, c, g, or t
  misc_feature (1325)..(1325): n is a, c, g, or t
  misc_feature (1328)..(1328): n is a, c, g, or t
  misc_feature (1347)..(1347): n is a, c, g, or t
  misc_feature (1350)..(1350): n is a, c, g, or t
  misc_feature (1353)..(1353): n is a, c, g, or t
  misc_feature (1357)..(1358): n is a, c, g, or t
agaaattactatgagaggatcgcatcaccatcaccatcacggatcctatttaggtgacactatagaatcgtcgacccacgcgtccgcggacgcgtgggtggacgggctgcatgaggaccttaatcgggtgaagaagaaggagtatgtggagctgtgcgatgctgctgggcgaccggatcaggaggtggcacaggaggcatggcaaaaccacaaacggcggaacgattctgtgatcgtggacactttccacggcctcttcaagtccacgctggtgtgccccgattgtggcaatgtatctgtgaccttcgaccccttctgctacctcagtgttccactgcctatcagccacaagagggtcttggaggtcttctttatccccatggatccgcgccgcaagccagagcagcaccggctcgtggtccccaagaaaggcaagatctcggatctatgtgtggctctgtccaaacacacgggcatctcgccagagaggatgatggtggctgatgtcttcagtcaccgcttctataagctctatcagctagaggagcctctgagcagcatcttggaccgtgatgatatcttcgtctatgaggtgtcaggtcgcattgaggccattgagggctcaagagaggacatcgtggttcctgtctacctgcgggagcgcacccctgcccgtgactacaacaactcctactacggcctgatgctttttggacaccccctcctggtatcagtgccccgggaccgcttcacctgggagggcctgtataacgtcctgatgtaccggctctcacgctacgtgaccaaacccaactcaaatgatgaggacgatggggatgagaaagaanatgacgaggaggataaagatgacgtccctgggnccctcaactggggggcagccctccganaaccctgancccaaaacangctgggncccagctctggaatcacgaacaggtgnccngttcctcctgganaattgccttggcacattctcaatgggccccccaanggnaaaanccaagcancttgttcncccntggaaannggggaactccaatngggaaccaacnaaccncnaaacctccccttgaaaaaattccaatgcccnncccntaaattntttatccaatgggaaacccaaaaannaaaaanccttttcttntacaagtaaaangctgaggnctacntaaaacataantnccncgggnactnaaaaaaaaagcccccggngcttnaaaaangcatttnaccctnccccctggggaaccnggaaaaaaaaaccctggaatgnccttcttnnaaananccngtgaaaaaaaaanggnacttgaaattcccaaaatnccnctncccnnaaac

SEQ ID NO: 336 - DNA, 1179 bp, Homo Sapiens
  misc_feature (906)..(906): n is a, c, g, or t
  misc_feature (917)..(917): n is a, c, g, or t
  misc_feature (950)..(950): n is a, c, g, or t
  misc_feature (961)..(961): n is a, c, g, or t
  misc_feature (975)..(975): n is a, c, g, or t
  misc_feature (1003)..(1003): n is a, c, g, or t
  misc_feature (1007)..(1007): n is a, c, g, or t
  misc_feature (1023)..(1023): n is a, c, g, or t
  misc_feature (1049)..(1049): n is a, c, g, or t
  misc_feature (1075)..(1075): n is a, c, g, or t
  misc_feature (1089)..(1089): n is a, c, g, or t
  misc_feature (1096)..(1096): n is a, c, g, or t
  misc_feature (1098)..(1098): n is a, c, g, or t
  misc_feature (1109)..(1109): n is a, c, g, or t
  misc_feature (1114)..(1114): n is a, c, g, or t
  misc_feature (1127)..(1128): n is a, c, g, or t
  misc_feature (1137)..(1137): n is a, c, g, or t
  misc_feature (1150)..(1153): n is a, c, g, or t
  misc_feature (1161)..(1161): n is a, c, g, or t
  misc_feature (1164)..(1164): n is a, c, g, or t
  misc_feature (1172)..(1172): n is a, c, g, or t
  misc_feature (1176)..(1177): n is a, c, g, or t
aaatagagaaattactatgagaggatcgcatcaccatcaccatcacggatcctatttaggtgacactatagaatcgtcgacccacgcgtccgggggctctggtgccgggctgagcgggggaagcaggggtagcggagccatgggggacgctcccagccctgaagagaaactgcaccttatcacccggaacctgcaggaggttctgggggaagagaagctgaaggagatactgaaggagcgggaacttaaaatttactggggaacggcaaccacgggcaaaccacatgtggcttactttgtgcccatgtcaaagattgcagacttcttaaaggcagggtgtgaggtaacaattctgtttgcggacctccacgcatacctggataacatgaaagccccatgggaacttctagaactccgagtcagttactatgagaatgtgatcaaagcaatgctggagagcattggtgtgcccttggagaagctcaagttcatcaaaggcactgattaccagctcagcaaagagtacacactagatgtgtacagactctcctccgtggtcacacagcacgattccaagaaggctggagctgaggtggtaaagcaggtggagcaccctttgctgagtggcctcttataccccggactgcaggctttggatgaagagtatttaaaagtagatgcccaatttggaggcattgatcagagaaagattttcacctttgcagagaagtacctccctgcacttggctattcaaaacgggtccatctgatgaatcctatggttccaggattaacaggcagcaaaatgagctcttcagaagaggagtccaagattgatctccttgatcggaaggaggatgtgaagaaaaaactgaagaaggccttctgtgagccaggaatgtgganaacaatggggnttctgtccttcatcaagcatgtcctttttcccnttaagtccgantttgtgatcctacnaaatgaaaaatggggtggaaacaaaacntacncagcttacgtggaacntggaaaaggactttgctgctgaggtngtacctcctggaaaacctgaaaaatnttgttgaaatcccnctgaaananttgctggatcnatccnggaaaagtttaanncccctgccntgaaaaactggcnnnncttccttnccnaattcctnaaannaa

SEQ ID NO: 337 - DNA, 1384 bp, Homo Sapiens
  misc_feature (840)..(840): n is a, c, g, or t
  misc_feature (883)..(883): n is a, c, g, or t
  misc_feature (904)..(904): n is a, c, g, or t
  misc_feature (912)..(912): n is a, c, g, or t
  misc_feature (948)..(948): n is a, c, g, or t
  misc_feature (981)..(981): n is a, c, g, or t
  misc_feature (990)..(990): n is a, c, g, or t
  misc_feature (1029)..(1029): n is a, c, g, or t
  misc_feature (1036)..(1036): n is a, c, g, or t
  misc_feature (1039)..(1040): n is a, c, g, or t
  misc_feature (1045)..(1045): n is a, c, g, or t
  misc_feature (1055)..(1055): n is a, c, g, or t
  misc_feature (1061)..(1061): n is a, c, g, or t
  misc_feature (1081)..(1082): n is a, c, g, or t
  misc_feature (1085)..(1085): n is a, c, g, or t
  misc_feature (1088)..(1088): n is a, c, g, or t
  misc_feature (1092)..(1092): n is a, c, g, or t
  misc_feature (1099)..(1099): n is a, c, g, or t
  misc_feature (1104)..(1104): n is a, c, g, or t
  misc_feature (1115)..(1115): n is a, c, g, or t
  misc_feature (1120)..(1121): n is a, c, g, or t
  misc_feature (1125)..(1125): n is a, c, g, or t
  misc_feature (1128)..(1128): n is a, c, g, or t
  misc_feature (1151)..(1151): n is a, c, g, or t
  misc_feature (1159)..(1159): n is a, c, g, or t
  misc_feature (1161)..(1161): n is a, c, g, or t
  misc_feature (1173)..(1173): n is a, c, g, or t
  misc_feature (1188)..(1188): n is a, c, g, or t
  misc_feature (1198)..(1198): n is a, c, g, or t
  misc_feature (1206)..(1208): n is a, c, g, or t
  misc_feature (1219)..(1219): n is a, c, g, or t
  misc_feature (1230)..(1230): n is a, c, g, or t
  misc_feature (1241)..(1241): n is a, c, g, or t
  misc_feature (1252)..(1252): n is a, c, g, or t
  misc_feature (1254)..(1254): n is a, c, g, or t
  misc_feature (1262)..(1262): n is a, c, g, or t
  misc_feature (1273)..(1273): n is a, c, g, or t
  misc_feature (1281)..(1281): n is a, c, g, or t
  misc_feature (1288)..(1288): n is a, c, g, or t
  misc_feature (1291)..(1291): n is a, c, g, or t
  misc_feature (1295)..(1295): n is a, c, g, or t
  misc_feature (1301)..(1301): n is a, c, g, or t
  misc_feature (1310)..(1310): n is a, c, g, or t
  misc_feature (1313)..(1313): n is a, c, g, or t
  misc_feature (1325)..(1325): n is a, c, g, or t
  misc_feature (1327)..(1327): n is a, c, g, or t
  misc_feature (1334)..(1334): n is a, c, g, or t
  misc_feature (1338)..(1338): n is a, c, g, or t
  misc_feature (1345)..(1345): n is a, c, g, or t
  misc_feature (1349)..(1349): n is a, c, g, or t
  misc_feature (1367)..(1368): n is a, c, g, or t
  misc_feature (1383)..(1384): n is a, c, g, or t
agagaaattactatgagaggatcgcatcaccatcaccatcacggatcctatttaggtgacactatagaatcgtcgacccacgcgtccgctggcgctgaggaggcggcggtggctcccggggcgtttgagcgggctcacccgagcccgcgggccaacgcggatccaggcccgactggcgggaccgccccggattccccgcgggccttcctagccgccatggaggacggcgtctatgaacccccagacctgactccggaggagcggatggagctggagaacatccggcggcggaagcaggagctgctggtggagattcagcgcctgcgggaggagctcagtgaagccatgagcgaggtggaggggctggaggccaatgagggcagtaagaccttgcaacggaaccggaagatggcaatgggcaggaagaagttcaacatggaccccaagaaggggatccagttcttggtggagaatgaactgctgcagaacacacccgaggagatcgcccgcttcctgtacaagggcgaggggctgaacaagacagccatcggggactacctgggggagagggaagaactgaacctggcagtgctccatgcttttgtggatctgcatgagttcaccgacctcaatctggtgcaggccctcaggcagtttctatggagctttcgcctacccggagaggcccagaaaattgaccggatgatggaggccttcgcccagcgatactgcctgtgcaaccctggggttttccagtccacagacacgtgctatgtgctgtccttcgccgtcatcatgctcaacaccagtctccacaatcccaatgtccgggacaagccngggcctggagcgctttgtggccatgaaccgggggcatcacganggcggggacctgcctgagganctgctcangaacctgtacgacagcatccgaaatgagcccttcanattcctgaggatgacgggaatgacctgacccanaccttcttnaacccggaaccgggagggcttggctcctgaaactggganggggccnggnnaaaancttggaaacngccctngtttttccccaaaaaaactnnccnttnctantttaatnacccncggaaaagganccccnngaanctncccctgggaaatttaaacctccnaagggganancccccgaaaccnaatttttttattttnttcccaaaanaagggcannnttcaaacctcnaaattagggangcccatggggnagaaacccatntntacgaatnccccccccccnagaaaaanaaaaggntancccnccccgnttgggtggnccnttttaatttggncnaaaaagntttntaaaaanggancccccccccccccttttnntaaaccccccggggnn

SEQ ID NO: 338 - DNA, 1106 bp, Homo Sapiens
  misc_feature (941)..(941): n is a, c, g, or t
  misc_feature (949)..(949): n is a, c, g, or t
  misc_feature (951)..(951): n is a, c, g, or t
  misc_feature (965)..(965): n is a, c, g, or t
  misc_feature (968)..(968): n is a, c, g, or t
  misc_feature (1022)..(1022): n is a, c, g, or t
  misc_feature (1066)..(1066): n is a, c, g, or t
  misc_feature (1069)..(1069): n is a, c, g, or t
  misc_feature (1073)..(1073): n is a, c, g, or t
  misc_feature (1076)..(1076): n is a, c, g, or t
  misc_feature (1086)..(1087): n is a, c, g, or t
  misc_feature (1089)..(1090): n is a, c, g, or t
  misc_feature (1092)..(1092): n is a, c, g, or t
  misc_feature (1095)..(1095): n is a, c, g, or t
  misc_feature (1101)..(1101): n is a, c, g, or t
  misc_feature (1103)..(1106): n is a, c, g, or t
attagagaaattactatgagaggatcgcatcaccatcaccatcacggatcctatttaggtgacactatagaatcgtcgacccacgcgtccgggaaaaaaagaaaggcccagagcattccagccaggaagagaagacaaggtggcctctcattagaagaagaggaagaggaggatgccaattcagaatctgagggaagcagtagtgaggaggaagatgacgctgcagagcaggaaaaaggcattggatcagaggatgccaggaaaaagaaggaggacgaactctgggccagcttcctcaatgatgtgggaccaaaatcaaaagtgcccccaagtacacaagttaagaaaggagaggagactgaagagacaagttcaagtaaattgttggtaaaagcagaagagctagagaaacctaaagaaacagaaaaagttaaaatcaccaaggtgtttgattttgctggtgaagaagtaagggtaactaaggaagtggatgctacatctaaagaggccaaatccttcttcaagcagaatgagaaagaaaaaccacaggctaatgttccttcagctctgccatcactccctgccgggtcagggttaaaaagatcaagtggcatgagcagccttttggggaaaattggtgccaagaagcagaaaatgagcacccttgagaagtccaaactggactgggagagcttcaaggaggaagaggggattggtgaagaactggccatccataatcgagggaaagaggggtacattgaacggaaagccttcctcgaccgagtggatcacaggcagtttgaaattgagcgagatctcaggctgagcaaaatgaaaccttgatgttacgggctaaatcaagagcagcttaatcctgttttacaatgtgagctttttgtgcgtctgtgaaatgttttacagtgtttctcatcatctggttncccagcangnctttttttttttcnacnttgaaagtcctgtctatgtatcctaatccccaaatggtttccttcccctttacnttttaaaaatttgtccttaaatgaataaataaaaaaaaaagttnggncctnggngaggttattnnanntnaanaaaaanannnn

SEQ ID NO: 339 - DNA, 1122 bp, Homo Sapiens
  misc_feature (1)..(1): n is a, c, g, or t
  misc_feature (871)..(871): n is a, c, g, or t
  misc_feature (893)..(893): n is a, c, g, or t
  misc_feature (899)..(899): n is a, c, g, or t
  misc_feature (903)..(903): n is a, c, g, or t
  misc_feature (912)..(912): n is a, c, g, or t
  misc_feature (921)..(921): n is a, c, g, or t
  misc_feature (933)..(933): n is a, c, g, or t
  misc_feature (937)..(937): n is a, c, g, or t
  misc_feature (946)..(946): n is a, c, g, or t
  misc_feature (948)..(949): n is a, c, g, or t
  misc_feature (961)..(961): n is a, c, g, or t
  misc_feature (972)..(972): n is a, c, g, or t
  misc_feature (979)..(979): n is a, c, g, or t
  misc_feature (984)..(984): n is a, c, g, or t
  misc_feature (988)..(988): n is a, c, g, or t
  misc_feature (993)..(993): n is a, c, g, or t
  misc_feature (999)..(999): n is a, c, g, or t
  misc_feature (1002)..(1003): n is a, c, g, or t
  misc_feature (1008)..(1008): n is a, c, g, or t
  misc_feature (1027)..(1027): n is a, c, g, or t
  misc_feature (1030)..(1031): n is a, c, g, or t
  misc_feature (1034)..(1034): n is a, c, g, or t
  misc_feature (1041)..(1041): n is a, c, g, or t
  misc_feature (1049)..(1049): n is a, c, g, or t
  misc_feature (1059)..(1059): n is a, c, g, or t
  misc_feature (1065)..(1065): n is a, c, g, or t
  misc_feature (1068)..(1068): n is a, c, g, or t
  misc_feature (1075)..(1075): n is a, c, g, or t
  misc_feature (1080)..(1080): n is a, c, g, or t
  misc_feature (1087)..(1087): n is a, c, g, or t
  misc_feature (1092)..(1092): n is a, c, g, or t
  misc_feature (1096)..(1096): n is a, c, g, or t
  misc_feature (1099)..(1100): n is a, c, g, or t
  misc_feature (1115)..(1115): n is a, c, g, or t
  misc_feature (1120)..(1120): n is a, c, g, or t
naatagagaaattactatgagaggatcgcatcaccatcaccatcacggatcctatttaggtgacactatagaatcgtcgacccacgcgtccgcgcccaggcggcggccgacgcgacgccccgagcgcccggccccgccgccgcggcccggcagactgcctctgtcaccgggtccctccacccttgtctcctgtgcggccagcgtcagagccatggcgacggaggagaagaagcccgagaccgaggccgccagagcacagccaaccccttcgtcatccgccactcagagcaagcctacacctgtgaagccaaactatgctctaaagttcacccttgctggccacaccaaagcagtgtcctccgtgaaattcagcccgaatggagagtggctggcaagttcatctgctgataaacttattaaaatttggggcgcgtatgatgggaaatttgagaaaaccatatctggtcacaagctgggaatatccgatgtagcctggtcgtcagattctaaccttcttgtttctgcctcagatgacaaaaccttgaagatatgggacgtgagctcgggcaagtgtctgaaaaccctgaagggacacagtaattatgtcttttgctgcaacttcaatccccagtccaaccttattgtctcaggatcctttgacgaaagcgtgaggatatgggatgtgaaaacagggaagtgcctcaagactttgccagctcactcggatccagtctcggccgttcattttaatcgtgatggatccttgatagtttcaagtagctatgatggtctctgtcgcatctgggaacaccgcctcaggccagtgcctgaagacgctcatcgatgacgacaaccccccccgtgtcttttngtgaatttctcccccgaacggnaaatanatcntggccgccncgctggaanaacactctgaancttntgggactananncaaggggaaatncctgaaaaacntacactnggccncaanaatgnaaaaanaanngcatnttttgccaatttctctgtnaannggngggaaantggattgngtcttggttnaaaaanaanaaccttntttanttttggnaaccntttnaannaaaaaaaattttacnaaaanta

SEQ ID NO: 340 - DNA, 1042 bp, Homo Sapiens
  misc_feature (1)..(1): n is a, c, g, or t
  misc_feature (861)..(861): n is a, c, g, or t
  misc_feature (868)..(868): n is a, c, g, or t
  misc_feature (873)..(873): n is a, c, g, or t
  misc_feature (912)..(912): n is a, c, g, or t
  misc_feature (967)..(967): n is a, c, g, or t
  misc_feature (982)..(982): n is a, c, g, or t
  misc_feature (995)..(995): n is a, c, g, or t
  misc_feature (1002)..(1002): n is a, c, g, or t
  misc_feature (1025)..(1025): n is a, c, g, or t
ntagagagaattactatgagaggatcgcatcaccatcaccatcacggatcctatttaggtgacactatagaatcgtcgacccacgcgtccggctccaaagacctacagatggtgaatatctccctgcgagtgttgtctcgacccaatgctcaggagcttcctagcatgtaccagcgcctagggctggactacgaggaacgagtgttgccgtccattgtcaacgaggtgctcaagagtgtggtggccaagttcaatgcctcacagctgatcacccagcgggcccaggtatccctgttgatccgccgggagctgacagagagggccaaggacttcagcctcatcctggatgatgtggccatcacagagctgagctttagccgagagtacacagctgctgtagaagccaaacaagtggccagcaggaggcccagcgggcccaattcttggtagaaaaagcaaagcaggaacagcggcagaaaattgtgcaggccgagggtgaggccgaggctgccaagatgcttggagaagcactgagcaagaaccctggctacatcaaacttcgcaagattcgagcagcccagaatatctccaagacgatcgccacatcacagaatcgtatctatctcacagctgacaaccttgtgctgaacctacaggatgaaagtttcaccaggggaagtgacagcctcatcaagggtaagaaatgagcctagtcaccaagaactccacccccagaggaagtggatctgcttctccagtttttgaggagccagccaggggtccagcacagccctaccccgccccagtatcatgcgatggtcccccacaccggttccctgaacccctcttggattaaggaanactgaanactanccccttttctggggaattacttttcctcctccctgtgtnaactggggctgttggggacagtgcgtgatttctcagtgatttcctacagggttgnttcccctcccctcanggctgggaagganataaacnccaacccaggaattctcaataantttttttacttaacctg

SEQ ID NO: 341 - DNA, 1066 bp, Homo Sapiens
  misc_feature (879)..(879): n is a, c, g, or t
  misc_feature (904)..(904): n is a, c, g, or t
  misc_feature (910)..(910): n is a, c, g, or t
  misc_feature (913)..(913): n is a, c, g, or t
  misc_feature (957)..(957): n is a, c, g, or t
  misc_feature (983)..(984): n is a, c, g, or t
  misc_feature (987)..(987): n is a, c, g, or t
  misc_feature (994)..(994): n is a, c, g, or t
  misc_feature (1007)..(1007): n is a, c, g, or t
  misc_feature (1011)..(1011): n is a, c, g, or t
  misc_feature (1026)..(1026): n is a, c, g, or t
  misc_feature (1038)..(1038): n is a, c, g, or t
  misc_feature (1043)..(1044): n is a, c, g, or t
  misc_feature (1046)..(1049): n is a, c, g, or t
  misc_feature (1051)..(1054): n is a, c, g, or t
  misc_feature (1056)..(1057): n is a, c, g, or t
  misc_feature (1061)..(1062): n is a, c, g, or t
  misc_feature (1065)..(1065): n is a, c, g, or t
tagagagattactatgagaggatcgcatcaccatcaccatcacggatcctatttaggtgacactatagaatcgtcgacccacgcgtccgcggacgcgtggggttgtgctcggtgcgctgagctccgcggctccgcgagccggttccgtccccttcccgccgccgccatgaagtggatgttcaaggaggaccactcgctggaacacagatgcgtggagtccgcgaagattcaagcgaaatatcccgacagggttccggtgattgtggaaaaggtctcaggctctcagattgttgacattgacaaacggaagtacttggttccatctgatatcactgtggctcagttcatgtggatcatcaggaaaaggatccagcttccttctgaaaaggcgatcttcctgtttgtggataagacagtcccacagtccagcctaactatgggacagctttacgagaaggaaaaagatgaagatggattcttatatgtggcctacagcggagagaacacttttggcttctgagggccattgctgggctaggtgcaccgtaactgcttgtgtatcttgtaaatagccagccattttcagttattataccagaacctcttcacatagacctattagtgcatttgtaactggatttatttcttaatatattggaaggttttgtttccttagactagtaaattatcatacagagttttattttgagtttttctttttgtgcattgtcctcatgcctgtattctccaggaaacttgtccttctggaaatcatattgaatgatatttctatatcgaagtgaggtaggtgcggtattaaagtgaaagggaaggtgatgcatttattctgggttatgcttgaagtgttaaatggctaantattaaaaattatccaaattaaatnccttancantcagaaacacttgcttcactaaaatatgcccacctgcccaatcntgttggactgagctaatttggttccnnttnctgaaantattaaggtaatnaatnaccaaaaaaaattcncttaaaagggcnaaaannannnnannnncnnaaannaana

SEQ ID NO: 342 - DNA, 941 bp, Homo Sapiens
  misc_feature (9)..(9): n is a, c, g, or t
  misc_feature (623)..(623): n is a, c, g, or t
  misc_feature (625)..(625): n is a, c, g, or t
  misc_feature (628)..(628): n is a, c, g, or t
  misc_feature (644)..(644): n is a, c, g, or t
  misc_feature (676)..(676): n is a, c, g, or t
  misc_feature (679)..(679): n is a, c, g, or t
  misc_feature (725)..(725): n is a, c, g, or t
  misc_feature (740)..(740): n is a, c, g, or t
  misc_feature (743)..(743): n is a, c, g, or t
  misc_feature (746)..(746): n is a, c, g, or t
  misc_feature (749)..(749): n is a, c, g, or t
  misc_feature (757)..(757): n is a, c, g, or t
  misc_feature (764)..(764): n is a, c, g, or t
  misc_feature (775)..(775): n is a, c, g, or t
  misc_feature (798)..(798): n is a, c, g, or t
  misc_feature (806)..(806): n is a, c, g, or t
  misc_feature (816)..(816): n is a, c, g, or t
  misc_feature (818)..(819): n is a, c, g, or t
  misc_feature (829)..(829): n is a, c, g, or t
  misc_feature (835)..(836): n is a, c, g, or t
  misc_feature (839)..(839): n is a, c, g, or t
  misc_feature (848)..(849): n is a, c, g, or t
  misc_feature (852)..(853): n is a, c, g, or t
  misc_feature (867)..(867): n is a, c, g, or t
  misc_feature (871)..(871): n is a, c, g, or t
  misc_feature (874)..(874): n is a, c, g, or t
  misc_feature (885)..(885): n is a, c, g, or t
  misc_feature (889)..(889): n is a, c, g, or t
  misc_feature (906)..(907): n is a, c, g, or t
  misc_feature (910)..(910): n is a, c, g, or t
  misc_feature (925)..(925): n is a, c, g, or t
  misc_feature (932)..(932): n is a, c, g, or t
  misc_feature (938)..(941): n is a, c, g, or t
tagagaganttaactatgagaggatcgcatcaccatcaccatcacgggatcctatttaggtgacactatagaatcgtcgacccacgcgtccgctcacattgtggtggatgaaggcatggactatgagcgagccctccgccttctcagactaccccagctgcccccgggtgctcagctggtgaagtcagcctggctgagcttgtgccttcaggagaggaggctggtggatgtagctggattcagcatcttcatccccagtaggtacttggaccatccacagcccagcaaggcagagcaggatgcttctattcctcctggcacccatgaggccctgcttcagacagccctttctcctcctcctcctcccaccaggcctgtgtctcctccccaaaaggcaaaagaggcaccaaacacccaagcccagcccatctctgatgatgaagccagtgatggggaagaaacccaggttagtgcagctgatctggaagccctcatcagtggccactaccccacctcccttgagggagattgtgagcctagcccagcccctgctgtcctggataagtgggtctgtgcacagccctcaagccagaaggcgaccaatcacaacctccatatcacananaanctggaagttctggccnaaaccctacagtgttcagggagacaagtgganggncctgggctatgccaaggccatcaatgccctcaagagcttccataancctgtcacctcgtancangtncanaaaagcancccaagnctttaactctnggctgctgtgtgtggcatgtggntcataccnacggggaaangnnaacctgtggngaagtnnaantgctcatcnntcnnccaaatgggccggncccnccnggggtattttnaccncctccttgaaagttttnnggnaggaagggttcctcnaaaaatnaatttnnnn

SEQ ID NO: 343 - DNA, 1276 bp, Homo Sapiens
  misc_feature (871)..(871): n is a, c, g, or t
  misc_feature (933)..(933): n is a, c, g, or t
  misc_feature (953)..(953): n is a, c, g, or t
  misc_feature (956)..(956): n is a, c, g, or t
  misc_feature (959)..(959): n is a, c, g, or t
  misc_feature (961)..(961): n is a, c, g, or t
  misc_feature (967)..(967): n is a, c, g, or t
  misc_feature (970)..(970): n is a, c, g, or t
  misc_feature (976)..(976): n is a, c, g, or t
  misc_feature (986)..(986): n is a, c, g, or t
  misc_feature (1025)..(1025): n is a, c, g, or t
  misc_feature (1028)..(1028): n is a, c, g, or t
  misc_feature (1031)..(1031): n is a, c, g, or t
  misc_feature (1036)..(1036): n is a, c, g, or t
  misc_feature (1045)..(1045): n is a, c, g, or t
  misc_feature (1052)..(1052): n is a, c, g, or t
  misc_feature (1075)..(1075): n is a, c, g, or t
  misc_feature (1087)..(1087): n is a, c, g, or t
  misc_feature (1097)..(1097): n is a, c, g, or t
  misc_feature (1106)..(1106): n is a, c, g, or t
  misc_feature (1110)..(1110): n is a, c, g, or t
  misc_feature (1114)..(1114): n is a, c, g, or t
  misc_feature (1118)..(1118): n is a, c, g, or t
  misc_feature (1120)..(1120): n is a, c, g, or t
  misc_feature (1131)..(1131): n is a, c, g, or t
  misc_feature (1143)..(1143): n is a, c, g, or t
  misc_feature (1155)..(1155): n is a, c, g, or t
  misc_feature (1157)..(1157): n is a, c, g, or t
  misc_feature (1165)..(1166): n is a, c, g, or t
  misc_feature (1187)..(1187): n is a, c, g, or t
  misc_feature (1190)..(1191): n is a, c, g, or t
  misc_feature (1200)..(1200): n is a, c, g, or t
  misc_feature (1206)..(1206): n is a, c, g, or t
  misc_feature (1215)..(1215): n is a, c, g, or t
  misc_feature (1227)..(1228): n is a, c, g, or t
  misc_feature (1252)..(1252): n is a, c, g, or t
  misc_feature (1254)..(1254): n is a, c, g, or t
  misc_feature (1266)..(1266): n is a, c, g, or t
  misc_feature (1268)..(1268): n is a, c, g, or t
  misc_feature (1271)..(1271): n is a, c, g, or t
  misc_feature (1275)..(1275): n is a, c, g, or t
agagaaattactatgagaggatcgcatcaccatcaccatcacggatcctatttaggtgacactatagaatcgtcgacccacgcgtccggccgcttccaggacgtgggaccccaggccccagtgggctctgtgtaccagaagaccaatgccgtgtctgagattaaaagggttggtaaagacagcttctgggccaaagcagagaaggaggaggagaaccgtcggctggaggaaaagcggcgggccgaggaggcacagcggcagctggagcaggagcgccgggagcgtgagctgcgtgaggctgcacgccgggagcagcgctatcaggagcagggtggcgaggccagcccccagagcaggacgtgggagcagcagcaagaagtggtttcaaggaaccgaaatgagcaggagtctgccgtgcacccgagggagattttcaagcagaaggagagggccatgtccaccacctccatctccagtcctcagcctggcaagctgaggagccccttcctgcagaagcagctcacccaaccagagacccactttggcagagagccagctgctgccatctcaaggcccagggcagatctccctgctgaggagccggcgcccagcactcctccatgtctggtgcaggcagaagaggaggctgtgtatgaggaacctccagagcaggagaccttctacgagcagcccccactggtgcagcagcaaggtgctggctctgagcacattgaccaccacattcagggccaggggctcagtgggcaagggctctgtgcccgtgccctgtacgactaccaggcagccgacgacacagagatctcctttgaccccgagaacctcatcacgggcatcgaggtgatcgacgaangctggtggcgtggctatgggccggatggccattttggcatgttccctgccaactacgtgganctcatttgagtgaggctganggncanantcttgnccnttcccntctcaaaaantggcttcctttattgctggaaaaaggaagcccggggaanttnaanttccncacttcttncaggaanaaggaccccccagtgaaggatgnagccctcaaggntttccctccnggtttgggnaaantcancttntncccccaaatgnaaaattgccctngggatttccaanantctttttnntttccccaaccctccaaaaanttnntttttgccntgaaanaaaatgaancaaccctgcttnngccaaccctgattgccctttccancntcgggaaaggtncnganaggnc

SEQ ID NO: 344 - DNA, 1179 bp, Homo Sapiens
  misc_feature (1)..(1): n is a, c, g, or t
  misc_feature (3)..(3): n is a, c, g, or t
  misc_feature (846)..(846): n is a, c, g, or t
  misc_feature (900)..(900): n is a, c, g, or t
  misc_feature (902)..(902): n is a, c, g, or t
  misc_feature (912)..(912): n is a, c, g, or t
  misc_feature (921)..(921): n is a, c, g, or t
  misc_feature (973)..(973): n is a, c, g, or t
  misc_feature (989)..(989): n is a, c, g, or t
  misc_feature (1001)..(1001): n is a, c, g, or t
  misc_feature (1023)..(1023): n is a, c, g, or t
  misc_feature (1031)..(1031): n is a, c, g, or t
  misc_feature (1036)..(1036): n is a, c, g, or t
  misc_feature (1088)..(1088): n is a, c, g, or t
  misc_feature (1090)..(1090): n is a, c, g, or t
  misc_feature (1093)..(1093): n is a, c, g, or t
  misc_feature (1100)..(1100): n is a, c, g, or t
  misc_feature (1112)..(1112): n is a, c, g, or t
  misc_feature (1116)..(1116): n is a, c, g, or t
  misc_feature (1120)..(1120): n is a, c, g, or t
  misc_feature (1123)..(1123): n is a, c, g, or t
  misc_feature (1138)..(1138): n is a, c, g, or t
  misc_feature (1150)..(1150): n is a, c, g, or t
  misc_feature (1158)..(1158): n is a, c, g, or t
  misc_feature (1173)..(1173): n is a, c, g, or t
nanttagagaaattactatgagaggatcgcatcaccatcaccatcacggatcctatttaggtgacactatagaatcgtcgacccacgcgtccggcttcgtgcacatgtgtcaggacctgcgtgtgctcaatgctgttcgggactatcacatcgggatcccgctcacctatagccaatataagcagctcaccatccaggtgctgctggacaggctcgtgttgcggagactttaccccctggccatccagatatgcgagtacttgcgccttcctgaagtacagggcgtcagcaggatcctggcccactgggcctgctacaaggtgcaacagaaggatgtctcagatgaggatgtggctcgagccattaaccagaagctgggggacacgcctggtgtctcttactccgacattgctgcacgagcctatggttgtggccgcacggagctggccatcaagctgctggagtatgagccacgctcaggggagcaggtaccccttctcctaaagatgaagaggagcaaactggcactaagcaaggccatcgagagcggggacactgacctggtgttcacggtgttgctgcacctgaagaacgagctgaaccgaggagattttttcatgacccttcggaatcagcccatggccctcagtttgtaccgacagttctgtaagcatcaggagctagagacgctgaaggacctttacaatcaggatgacaatcaccaggaattgggcagcttccacatccgagccagctatgctgcagaagagcgtattgaggggcgagtagcagctctgcagacagccgccgatgccttctacaaggccaagaatgagtttgcagccnaggctacagaggatcaaatgcggctcctacggctgcagcggcgcctaaaaaacnanctggggggcnagttcctanacctgtctctacatgacacagttaccaccctcattcttggcggtcaaaaaancgtgcaaacaactggnacgtgacttccncatccctgaaaaaagctctggnggctgaanctgantgccctggcaaattggaaaatgggaaaactaaaaattttccaaaacaaaaancnccnttggctnctgcctttgggnaatntgcntgnaacactaacaattcnaacccaaaattncttccccngggtcccaaaaaagnaaggtt

SEQ ID NO: 345 - DNA, 1179 bp, Homo Sapiens
  misc_feature (819)..(819): n is a, c, g, or t
  misc_feature (870)..(870): n is a, c, g, or t
  misc_feature (872)..(872): n is a, c, g, or t
  misc_feature (910)..(910): n is a, c, g, or t
  misc_feature (913)..(914): n is a, c, g, or t
  misc_feature (929)..(929): n is a, c, g, or t
  misc_feature (953)..(953): n is a, c, g, or t
  misc_feature (959)..(960): n is a, c, g, or t
  misc_feature (962)..(962): n is a, c, g, or t
  misc_feature (972)..(972): n is a, c, g, or t
  misc_feature (979)..(979): n is a, c, g, or t
  misc_feature (983)..(983): n is a, c, g, or t
  misc_feature (995)..(995): n is a, c, g, or t
  misc_feature (1004)..(1005): n is a, c, g, or t
  misc_feature (1010)..(1010): n is a, c, g, or t
  misc_feature (1018)..(1018): n is a, c, g, or t
  misc_feature (1025)..(1025): n is a, c, g, or t
  misc_feature (1038)..(1038): n is a, c, g, or t
  misc_feature (1047)..(1047): n is a, c, g, or t
  misc_feature (1060)..(1060): n is a, c, g, or t
  misc_feature (1075)..(1075): n is a, c, g, or t
  misc_feature (1080)..(1082): n is a, c, g, or t
  misc_feature (1088)..(1089): n is a, c, g, or t
  misc_feature (1101)..(1101): n is a, c, g, or t
  misc_feature (1112)..(1112): n is a, c, g, or t
  misc_feature (1117)..(1117): n is a, c, g, or t
  misc_feature (1127)..(1127): n is a, c, g, or t
  misc_feature (1137)..(1137): n is a, c, g, or t
  misc_feature (1139)..(1139): n is a, c, g, or t
  misc_feature (1141)..(1141): n is a, c, g, or t
  misc_feature (1148)..(1148): n is a, c, g, or t
  misc_feature (1152)..(1152): n is a, c, g, or t
  misc_feature (1156)..(1156): n is a, c, g, or t
  misc_feature (1159)..(1159): n is a, c, g, or t
  misc_feature (1166)..(1166): n is a, c, g, or t
  misc_feature (1169)..(1169): n is a, c, g, or t
  misc_feature (1173)..(1173): n is a, c, g, or t
  misc_feature (1176)..(1176): n is a, c, g, or t
tagagaaattactatgagaggatcgcatcaccatcaccatcacggatcctatttaggtgacactatagaatcgtcgacccacgcgtccggccagctccaccagcacgtgcagcagctacacctgggcacccggctgcctgtggtggtcgtggccaacaaagctgacctgttgcacatcaaacaggttgaccctcagcttggactgcagctagccagcatgctaggctgctcattctatgaagtgtctgtcagtgaaaattataatgatgtctacagcgccttccacgtcctctgtaaagaggtcagtcacaaacagcagcctagcagtacacccgagaagcgaagaacctccctcattcccaggcccaagtcacccaacatgcaggacctgaagaggaggtttaagcaagccctctctgccaaagtgaggactgtcacctccgtctgaagcaggaggagcactcaagggggtttggtcttcccaggaagagggcctgaggttctcctagtgcaggaacgttgaatattggcaatgattcctggttccagaaagggctggagcagaagggccaagagggcctgtggaactgctacagaaaaggaagtgttgttctgagcagggggacaggattgatgaggcttgaaagagcccactgagccactctctgaatatgtgaaatgtactctgtgtcttttcctttagagtggggagggggcataatcgtttcggtttctgcattcaactaccttgtaaatggtggtccgttgcagtttcaccaaatgtattgatgtgatttacagtgggaatgaaagaaacanataaggcattgataggctttccttttttcccccctttttttccttttttcncntttcctcctttccttttccccccttttttcccccaaanaannaaaaattggcttttnccccttaaccaaaaatgaatttgntaaacnntngaaacacctnattcttnaaanaatggccctttntaaaacctnnaaagnaaaccccnaaatttntttttttttttgnaaaaaaaangaaaaatcccccntaccccccaaaaaanaggtnnnattttnngggccccaaaantatttttttanacccnaaaaattggnaaactcctcngngnttaaaanaaancctntgnttccccnccnccanganata

SEQ ID NO: 346 - DNA, 1121 bp, Homo Sapiens
  misc_feature (1)..(2): n is a, c, g, or t
  misc_feature (4)..(4): n is a, c, g, or t
  misc_feature (867)..(867): n is a, c, g, or t
  misc_feature (886)..(886): n is a, c, g, or t
  misc_feature (889)..(889): n is a, c, g, or t
  misc_feature (897)..(897): n is a, c, g, or t
  misc_feature (911)..(911): n is a, c, g, or t
  misc_feature (953)..(954): n is a, c, g, or t
  misc_feature (963)..(963): n is a, c, g, or t
  misc_feature (969)..(969): n is a, c, g, or t
  misc_feature (986)..(986): n is a, c, g, or t
  misc_feature (988)..(988): n is a, c, g, or t
  misc_feature (990)..(990): n is a, c, g, or t
  misc_feature (993)..(993): n is a, c, g, or t
  misc_feature (1005)..(1005): n is a, c, g, or t
  misc_feature (1009)..(1009): n is a, c, g, or t
  misc_feature (1015)..(1016): n is a, c, g, or t
  misc_feature (1023)..(1023): n is a, c, g, or t
  misc_feature (1026)..(1026): n is a, c, g, or t
  misc_feature (1051)..(1052): n is a, c, g, or t
  misc_feature (1062)..(1062): n is a, c, g, or t
  misc_feature (1072)..(1072): n is a, c, g, or t
  misc_feature (1077)..(1077): n is a, c, g, or t
  misc_feature (1086)..(1086): n is a, c, g, or t
  misc_feature (1093)..(1094): n is a, c, g, or t
  misc_feature (1101)..(1101): n is a, c, g, or t
  misc_feature (1104)..(1104): n is a, c, g, or t
  misc_feature (1110)..(1111): n is a, c, g, or t
  misc_feature (1114)..(1114): n is a, c, g, or t
  misc_feature (1116)..(1116): n is a, c, g, or t
  misc_feature (1120)..(1120): n is a, c, g, or t
nnantagagaaattactatgagaggatcgcatcaccatcaccattcacggatcctatttaggtgacactatagaatcgtcgacccacgcgtccgcggaggcggactcgcaggtaatagtggccccgggacgccagtgccaacgcccctttactcgcaggttcctggacctgccctgggaagacgtgctgctcccacacgtcctgaaccgggtcccgctgcgccagctgctccggctgcagcgcgttagccgggccttccggtcgctggtgcagcttcacctggccgggctgcgtcgcttcgatgccgcgcaggtgagccgggggctgaagccccgcccctgcctgggtaccgccccgcctctagcccagcccccagccccgcagtatgcccttctggacccccttgggccgccggggctgcccggaagggatccacgcaccaaagggcaaatactcggtagcgactcagagggaaagtggggtctctcctgggagagcaggaggctgccagaaaagaactcaggtcaggggtgcataggcggctgaggagtgcgggacgggctgagagttggggtgcctccccgcccgcaggtgggtccgcagatcccgcgggccgcattggcccggctgctgcgggatgccgaggggctgcaggagctggcactggcgccgtgtcacgaatggctgtcagacgaggacctggtgccggtgctggcgcggaatccgcagctgcggagtgtggcgttgggcggctgcgggcaactgagtcgccgggcgcttggggctttggccgaaggctgcccacgcctgcagcgcctgtcgctcgcgcactgtgactgggtgggacgggctggcgctgcgcggccntcgctgatcgctgcccggnccntggagganctggatctcaccgncctgccgccagctcaaggaacaaggccattcgtgtacctggnncaaaaagcnccggcngcttggttttccgcaancntnttntttgggccgttnaaanccaaanntgggggnaanccccccggtttcaaaaaatttgggnntcggaaattncccaaaaaantccancaacctttngacttcnnccgggtngcnttcccnnttngnaaanc

SEQ ID NO: 347 - DNA, 1156 bp, Homo Sapiens
  misc_feature (1)..(1): n is a, c, g, or t
  misc_feature (39)..(39): n is a, c, g, or t
  misc_feature (913)..(913): n is a, c, g, or t
  misc_feature (920)..(920): n is a, c, g, or t
  misc_feature (944)..(944): n is a, c, g, or t
  misc_feature (953)..(953): n is a, c, g, or t
  misc_feature (988)..(988): n is a, c, g, or t
  misc_feature (990)..(990): n is a, c, g, or t
  misc_feature (995)..(995): n is a, c, g, or t
  misc_feature (997)..(997): n is a, c, g, or t
  misc_feature (1020)..(1020): n is a, c, g, or t
  misc_feature (1030)..(1030): n is a, c, g, or t
  misc_feature (1032)..(1032): n is a, c, g, or t
  misc_feature (1042)..(1042): n is a, c, g, or t
  misc_feature (1056)..(1056): n is a, c, g, or t
  misc_feature (1058)..(1058): n is a, c, g, or t
  misc_feature (1073)..(1073): n is a, c, g, or t
  misc_feature (1075)..(1075): n is a, c, g, or t
  misc_feature (1084)..(1084): n is a, c, g, or t
  misc_feature (1088)..(1088): n is a, c, g, or t
  misc_feature (1106)..(1106): n is a, c, g, or t
  misc_feature (1147)..(1147): n is a, c, g, or t
  misc_feature (1149)..(1149): n is a, c, g, or t
nggattagagagaattactatgagaggatcgcatcaccntcaccatcacggatcctatttaggtgacactatagaatcgtcgacccacgcgtccgaaagaattcatactggaaagaaaccatatgattgtggtgcatgcggaaaagccttcagtgagaagtttcatcttgttgtacatcagagaactcatactggggagaaaccttatgattgttctgaatgtggaaaagccttctctcagaaatcgtcccttattatacatcagagagttcacactggggaaaaaccctatgaatgtagtgaatgcgggaaagccttctcccagaaatcacccctcattatacatcagagaatacatactggggaaaaaccctatgaatgtagagagtgtgggaaggccttttcccagaagtcacagctgattatacaccacagagctcatactggagagaagccgtatgagtgtaccgaatgtgggaaagccttctgtgagaagtcccacctcattatacataaaagaattcacactggtgagaaaccctacaaatgtgctcaatgtgaggaagccttcagcaggaagacagaactcattacacatcagttagttcatactggggaaaaaccttatgaatgtactgaatgtggaaagacattctcccgcaagtcacagctcatcatacatcagagaacacatactggagaaaaaccctataaatgtagtgaatgtggcaaagccttctgccagaagtcacatctcattggacatcagagaattcacacaggagaaaaaccttatatatgtactgaatgtgggaaagccttctctcagaagtcccaccttccgggacaccagcgaattcatacaggagagaaaccttacatatgtgctgaatgtggaaaggccttttctcanaagtcanacttgttttacatcaaaggattcntactggggnaagaccctatcatgtgctatatgtgggaaggcctncntccanangtcccaactaactgtacccccanaaattccccngnggtaaaatcntaatgaactggccnanaaaagccttaatatnanctcagcctnatantactaaaacccattattngaaagctgggggacacctcccataaaaaaatttttagggantngttccag

SEQ ID NO: 348 - DNA, 998 bp, Homo Sapiens
  misc_feature (1)..(2): n is a, c, g, or t
  misc_feature (816)..(816): n is a, c, g, or t
  misc_feature (819)..(819): n is a, c, g, or t
  misc_feature (876)..(876): n is a, c, g, or t
  misc_feature (893)..(893): n is a, c, g, or t
  misc_feature (904)..(904): n is a, c, g, or t
  misc_feature (939)..(939): n is a, c, g, or t
  misc_feature (946)..(946): n is a, c, g, or t
  misc_feature (953)..(953): n is a, c, g, or t
  misc_feature (974)..(974): n is a, c, g, or t
  misc_feature (987)..(987): n is a, c, g, or t
  misc_feature (992)..(992): n is a, c, g, or t
  misc_feature (996)..(996): n is a, c, g, or t
nntagagaaattactatgagaggatcgcatcaccatcaccatcacggatcctatttaggtgacactatagaatcgtcgacccacgcgtccggccagccatgcagccttggcacggaaaggccatgcagagagcttccgaggccggagccactgcccccaaggcttccgcacggaatgccaggggcgccccgatggatcccaacgagtctccggctgcccccgaggccgccctgcctaaggcgggaaagttcggccccgccaggaagtcgggatcccggcagaaaaagagcgccccggacacccaggagaggccgcccgtccgcgcaactggggcccgcgccaaaaaggcccctcagcgcgcccaggacacgcagccgtctgacgccaccagcgcccctggggcagaggggctggagcctcctgcggctcgggagccggctctttccagggctggttcttgccgccagaggggcgcgcgctgctccacgaagccaagacccccgcccgggccctgggacgtgcccagccccggcctgccggtctcggcccccattctcgtacggagggatgcggcgcctggggcctcgaagctccgggcggttttggagaagttgaagctcagccgcgatgatatctccacggcggcggggatggtgaaaggggttgtggaccacctgctgctcagactgaagtgcgactccgcgttcagaggcgtcgggctgctgaacaccgggagctactatgagcacgtgaagatttctgcacctaatgaatttgatgtcatgtttaaactggaagtccccagaattcaactanaanaatattccaaacactcgtgcatattactttgtgaaatttaaaagaaatcccaaaaanaaaatcatctgagtcanttttttaaaangtgaaatatttatcagcttctaaaatgctgtcaanttttagnaaattcnttaaggaaaaaattaacgacntttaaaaatacanatgtnttcntg

SEQ ID NO: 349 - DNA, 1055 bp, Homo Sapiens
  misc_feature (2)..(2): n is a, c, g, or t
  misc_feature (9)..(9): n is a, c, g, or t
  misc_feature (638)..(638): n is a, c, g, or t
  misc_feature (836)..(836): n is a, c, g, or t
  misc_feature (842)..(842): n is a, c, g, or t
  misc_feature (844)..(844): n is a, c, g, or t
  misc_feature (849)..(849): n is a, c, g, or t
  misc_feature (857)..(857): n is a, c, g, or t
  misc_feature (893)..(893): n is a, c, g, or t
  misc_feature (901)..(901): n is a, c, g, or t
  misc_feature (905)..(905): n is a, c, g, or t
  misc_feature (919)..(919): n is a, c, g, or t
  misc_feature (923)..(923): n is a, c, g, or t
  misc_feature (930)..(930): n is a, c, g, or t
  misc_feature (937)..(937): n is a, c, g, or t
  misc_feature (939)..(939): n is a, c, g, or t
  misc_feature (947)..(947): n is a, c, g, or t
  misc_feature (950)..(950): n is a, c, g, or t
  misc_feature (960)..(960): n is a, c, g, or t
  misc_feature (968)..(968): n is a, c, g, or t
  misc_feature (975)..(975): n is a, c, g, or t
  misc_feature (982)..(982): n is a, c, g, or t
  misc_feature (986)..(986): n is a, c, g, or t
  misc_feature (991)..(991): n is a, c, g, or t
  misc_feature (996)..(996): n is a, c, g, or t
  misc_feature (998)..(998): n is a, c, g, or t
  misc_feature (1002)..(1002): n is a, c, g, or t
  misc_feature (1007)..(1007): n is a, c, g, or t
  misc_feature (1010)..(1010): n is a, c, g, or t
  misc_feature (1012)..(1013): n is a, c, g, or t
  misc_feature (1017)..(1017): n is a, c, g, or t
  misc_feature (1030)..(1030): n is a, c, g, or t
  misc_feature (1033)..(1033): n is a, c, g, or t
  misc_feature (1038)..(1038): n is a, c, g, or t
  misc_feature (1040)..(1040): n is a, c, g, or t
  misc_feature (1046)..(1046): n is a, c, g, or t
  misc_feature (1049)..(1049): n is a, c, g, or t
antagaganattactatgagaggatcgcatcaccatcaccatcacggatcctatttaggtgacactatagaatcgtcgacccacgcgtccgcaacaccagctctcagccccggccggagcctgcgcccccatctcatacccctgctgctgcgaggagccgaggccccgctgactgacgcctgccagcaggagatgtgcagcaagctccggggagcccagggcccactcggtcctgatatggagtcaccactgccaccccctcccctgtctctcctgcgccctgggggtgccccacccccgccccctaagaacccagcacgcctcatggccctggccctggctgagcgggctcagcaggtggccgagcaacagagccagcaggagtgtgggggcaccccacctgcttcccaatcccccttccaccgctcgctgtctctggaggtgggcggggagcccctggggacctcagggagtgggccacctcccaactccctagcacacccgggtgcctgggtcccgggacccccaccctacttaccaaggcaacaaagtgatgggagcctgctgaggagccagcggcccatggggacctcaaggaggggactccgaggccctgcccaggtcagtgcgcagctcanggcaggtggcgggggcagggatgcgccagaggcagcagcccagtccccatgttctgtcccctcacaggttcctacccccggcttcttctccccagcccccagggagtgcctgccaccctttctcggggtccccaagccaggcttgtaccccctgggccccccatccttccagcccaatttcccagccccagtttggangaactntntgggnccccctgnaccactcgaaaggggaaaaaactgtactatgaaatnggggcaantgangggtccccttattntggncccaccncttctgnantccttttnctncatgcccccnaaaggttnaaggctnctaaggnatgnttggncaatnancccnattcnaangnncccnaatttttgttaantanccgcnancccttntgntttccc

SEQ ID NO: 350 - DNA, 1019 bp, Homo Sapiens
  misc_feature (832)..(832): n is a, c, g, or t
  misc_feature (838)..(838): n is a, c, g, or t
  misc_feature (853)..(853): n is a, c, g, or t
  misc_feature (864)..(864): n is a, c, g, or t
  misc_feature (867)..(867): n is a, c, g, or t
  misc_feature (881)..(881): n is a, c, g, or t
  misc_feature (909)..(909): n is a, c, g, or t
  misc_feature (938)..(938): n is a, c, g, or t
  misc_feature (963)..(963): n is a, c, g, or t
  misc_feature (969)..(969): n is a, c, g, or t
  misc_feature (982)..(982): n is a, c, g, or t
  misc_feature (989)..(989): n is a, c, g, or t
  misc_feature (994)..(995): n is a, c, g, or t
  misc_feature (1000)..(1019): n is a, c, g, or t
tagagaaattactatgagaggatcgcatcaccatcaccatcacggatcctatttaggtgacactatagaatcgtcgacccacgcgtccggcgtgcagccgccgccgcagagccggagcgggggccgccggcgccgcatccctctctacctgccaacatcctgtattagagaacttgtggccggaggtgtggctgtggagagctggccggggagggacgctgctcagctgctgctctgctcctgtctcctgtcccctcccccggtcatgacagagacccgtgagccagctgagactgggggctacgccagcttggaagaagatgatgaagacctttccccaggccccgagcattcctctgattcagaatacactctctcagagccggactccgaagaggaagaagatgaggaggaggaggaagaggagaccactgacgatcctgaatatgatcctggctacaaggtgaagcagcgccttggcgggggccgtggtggcccatcccgccgggccccccgtgcagcccagcccccggcccagccttgccagctctgtggccgctcaccccttggggaggccccaccgggaaccccaccctgccggctctgctgccctgctacagccccccaggaagcaccagcccctgaaggcagggccctcggggaggaagaggaggaaccacctcgggctggggagggccgaccagctgggcgggaggaggaggaggaagaggaggaggagggaacctaccactgtacggaatgtgaggattccttcgacaacctgggggagctgcacgggcacttcatgctgcatgcccggggtgaggtgtangcagancccccatacggggancttggcaaaanggntggggtgggaaganggggctgaagaaattggggttgtgacantggtcatgggggatggggtactgccggtntttgttgtcttaaaaataaatgtgngatggncaaaaataaaaanccaaatntgttnnaaaannnnnnnnnnnnnnnnnnnn

SEQ ID NO: 351 - DNA, 1149 bp, Homo Sapiens
  misc_feature (1)..(1): n is a, c, g, or t
  misc_feature (830)..(830): n is a, c, g, or t
  misc_feature (921)..(921): n is a, c, g, or t
  misc_feature (932)..(932): n is a, c, g, or t
  misc_feature (957)..(957): n is a, c, g, or t
  misc_feature (969)..(969): n is a, c, g, or t
  misc_feature (1010)..(1010): n is a, c, g, or t
  misc_feature (1016)..(1016): n is a, c, g, or t
  misc_feature (1018)..(1018): n is a, c, g, or t
  misc_feature (1028)..(1028): n is a, c, g, or t
  misc_feature (1030)..(1030): n is a, c, g, or t
  misc_feature (1037)..(1037): n is a, c, g, or t
  misc_feature (1055)..(1055): n is a, c, g, or t
  misc_feature (1058)..(1058): n is a, c, g, or t
  misc_feature (1062)..(1062): n is a, c, g, or t
  misc_feature (1065)..(1065): n is a, c, g, or t
  misc_feature (1067)..(1067): n is a, c, g, or t
  misc_feature (1070)..(1070): n is a, c, g, or t
  misc_feature (1081)..(1081): n is a, c, g, or t
  misc_feature (1098)..(1098): n is a, c, g, or t
  misc_feature (1100)..(1100): n is a, c, g, or t
  misc_feature (1106)..(1106): n is a, c, g, or t
  misc_feature (1109)..(1109): n is a, c, g, or t
  misc_feature (1114)..(1115): n is a, c, g, or t
  misc_feature (1117)..(1117): n is a, c, g, or t
  misc_feature (1122)..(1123): n is a, c, g, or t
  misc_feature (1129)..(1130): n is a, c, g, or t
  misc_feature (1141)..(1141): n is a, c, g, or t
naaatagagaaattactatgagaggatcgcatcaccatcaccatcacggatcctatttaggtgacactatagaatcgtcgacccacgcgtccggagttgtggaaccaaagagagctgtctccagagaagattctcaaagaccaggtgcccacttaactgtgaaaaagatatttgttggtggcattaaagaagacactgaagaacatcacctaagagattattttgaacagtatggaaaaattgaagtgattgaaatcatgactgaccgaggcagtggcaagaaaaggggctttgcctttgtaacctttgacgaccatgactccgtggataagattgtcattcagaaataccatactgtgaatggccacaactgtgaagttagaaaagccctgtcaaagcaagagatggctagtgcttcatccagccaaagaggtcgaagtggttctggaaactttggtggtggtcgtggaggtggtttcggtgggaatgacaacttcggtcgtggaggaaacttcagtggtcgtggtggctttggtggcagccgtggtggtggtggatatggtggcagtggggatggctataatggatttggtaatgatggaagcaattttggaggtggtggaagctacaatgattttgggaattacaacaatcagtcttcaaattttggacccatgaagggaggaaattttggaggcagaagctctggcccctatggcggtggaggccaatactttgcaaaaccacgaaaccaaggtggctatggcggttccagcagcagcagtagctatggcagtggcagaagattttaattaggaaacaaagcttancaggagaggagagccagagaagtgacagggaagctacagggttacaacagattttgtgaactcagccaagcacagtggtggcagggcctanctgctacaaanaagacatgttttaaacaaatactcntgtgtatgggcnaaaaactccaggactgtatttgggactaattgtatacaggntatttnantttctgttcngnggaaagngtaaagcatcccaccaanggntttnaangnaanttttttttttnccccccctgccgttgantngctaantgnaacanncngatcnngacccnnaaaaaatgtcntttttttt

SEQ ID NO: 352 - DNA, 1044 bp, Homo Sapiens
  misc_feature (781)..(781): n is a, c, g, or t
  misc_feature (788)..(788): n is a, c, g, or t
  misc_feature (889)..(889): n is a, c, g, or t
  misc_feature (901)..(901): n is a, c, g, or t
  misc_feature (907)..(907): n is a, c, g, or t
  misc_feature (931)..(931): n is a, c, g, or t
  misc_feature (934)..(934): n is a, c, g, or t
  misc_feature (944)..(944): n is a, c, g, or t
  misc_feature (949)..(949): n is a, c, g, or t
  misc_feature (951)..(951): n is a, c, g, or t
  misc_feature (954)..(954): n is a, c, g, or t
  misc_feature (965)..(965): n is a, c, g, or t
  misc_feature (967)..(967): n is a, c, g, or t
  misc_feature (996)..(996): n is a, c, g, or t
  misc_feature (998)..(998): n is a, c, g, or t
  misc_feature (1002)..(1002): n is a, c, g, or t
  misc_feature (1009)..(1009): n is a, c, g, or t
  misc_feature (1012)..(1012): n is a, c, g, or t
  misc_feature (1014)..(1014): n is a, c, g, or t
  misc_feature (1019)..(1019): n is a, c, g, or t
  misc_feature (1021)..(1021): n is a, c, g, or t
  misc_feature (1028)..(1028): n is a, c, g, or t
  misc_feature (1031)..(1031): n is a, c, g, or t
  misc_feature (1036)..(1036): n is a, c, g, or t
tagagaaattactatgagaggatcgcatcaccatcaccatcacggatcctatttaggtgacactatagaatcgtcgacccacgcgtccgcagcaccccaaatcctgcagagtgtggaggggatctggggagaaggcaggggctgcccgggcgctctggctgctgggggtgggggacagggcctgccggggaagcgggtcgggggaggactggagacccaggctcccctaggtacaacgaacctcgcgggagggaatacgccatccccgtacccacttccgaggacgtaggtcttttggcaccggcggcagccgcgttcccacacatctgggcggggccccgcagcatggcctggggagctgaggcttcgggatccggcacaaactaccattctaggtgtagacggaggaggtggggtgtgggaagcagggggccatggtctgagcagaccttctcacctctgggcctcccacctcctggggcaggacttacggggaaggacccgaggggagtggggtgtccatagggacacccaagggtctatccctgcgagctttgctttctactaaaccaataatcgcagtggtggtggcagtcgagacacggctcaaagagccggcaagaatagagcagagaccaggatcgccccaggcagggaaaaaatgaccagttctgtagagtgacccgaaggtgatggaatcactcgggcgtcctcctgggaaagagctgcctgctcccccgccgccgccagtacaccggcgcccatgccccgggggctgganagagcanccaggcacaggtaactcaagaactccagtcccctcacgggtgccgtgctgtggggcgccctcaccccccacactttgggtccctgggcctcctcatcaaancaggggcctgantggcangaacacccctgtgtgcaaaataantgnccccctgcanccccnanagntcacttctttnangacctaagttggggcctgcccttggggantngggntgaaaanggnangttcnanccttcanaanccctnccccatga

SEQ ID NO: 353 - DNA, 1148 bp, Homo Sapiens
  misc_feature (967)..(967): n is a, c, g, or t
  misc_feature (978)..(978): n is a, c, g, or t
  misc_feature (997)..(997): n is a, c, g, or t
  misc_feature (1034)..(1034): n is a, c, g, or t
  misc_feature (1037)..(1037): n is a, c, g, or t
  misc_feature (1047)..(1047): n is a, c, g, or t
  misc_feature (1049)..(1049): n is a, c, g, or t
  misc_feature (1058)..(1058): n is a, c, g, or t
  misc_feature (1062)..(1062): n is a, c, g, or t
  misc_feature (1064)..(1064): n is a, c, g, or t
  misc_feature (1068)..(1068): n is a, c, g, or t
  misc_feature (1075)..(1075): n is a, c, g, or t
  misc_feature (1083)..(1083): n is a, c, g, or t
  misc_feature (1095)..(1095): n is a, c, g, or t
  misc_feature (1097)..(1097): n is a, c, g, or t
  misc_feature (1104)..(1104): n is a, c, g, or t
  misc_feature (1118)..(1119): n is a, c, g, or t
  misc_feature (1121)..(1121): n is a, c, g, or t
  misc_feature (1131)..(1131): n is a, c, g, or t
  misc_feature (1133)..(1133): n is a, c, g, or t
  misc_feature (1135)..(1136): n is a, c, g, or t
  misc_feature (1138)..(1139): n is a, c, g, or t
  misc_feature (1142)..(1144): n is a, c, g, or t
gagaaattactatgagaggatcgcatcaccatcaccatcacggatcctatttaggtgacactatagaatcgtcgacccacgcgtccgcagctccttctcggcgtgaacctggtggtgatgccgcccacccgggcccggagtctgcgcttcgttaccttgctgtaccgccatggagaccgttcaccagtgaagacatatcccaaggacccctatcaggaagaagaatggccccaggggtttggtcagttaaccaaggaggggatgctacagcactgggaactgggccaggccctgcggcagcgctatcacggcttcctaaacacctcttatcaccggcaagaggtttatgtgcgaagcacagactttgaccggactctcatgagtgctgaggccaacctggctggactcttccctcccaacgggatgcagcgcttcaacccgaacatctcgtggcagcctattcctgtgcacactgtgcccatcactgaggacaggctgctgaagttcccgttgggcccatgtccccgttatgagcagctgcagaacgagacccggcagacaccagagtatcagaatgagagttctcggaatgcacaatttctggacatggtggccaacgagacagggcttacagacctgacactggagaccgtctggaatgtctatgacacactcttctgtgagcaaacgcacgggctgcgcctgccgccctgggcctcaccccaaaccatgcagcgtctcagccggctaaaggacttcagcttccgcttcctcttcggaatctaccagcaggcggagaaggcccggcttcaggggggagtcctgctggctcagataaggaagaacctgaccctaatggcgaccacctcccagctccccaagctgctggtttactctgcgcacgacactaccctggttgccctgcaaatggcactggatgtctacaatggtgaacaagccccctacncctcctgccanatatttgaactgtacaagnaaaatctgggaatttctcagtggaaatgtactttcgnaanaaaatgaaangncccctggcngctnanctgnctggtgncctcacgntgccaatggagnanttctttncctcaaaaaccgtnngnccaagatggnanannannccnnntgga

SEQ ID NO: 354 - DNA, 965 bp, Homo Sapiens
tatgagaggatcgcatcaccatcaccatcacggatcctatttaggtgacactatagaatcgtcgacccacgcgtccgcaccaactataccatggagcacatccgcgtgggctgggagcagctgctcaccaccattgcccgcaccatcaacgaggtggagaaccagatcctcacccgcgacgccaagggcatcagccaggagcagatgcaggagttccgggcgtccttcaaccacttcgacaaggatcatggcggggcgctggggcccgaggagttcaaggcctgcctcatcagcctgggctacgacgtggagaacgaccggcagggtgaggccgagttcaaccgcatcatgagcctggtcgaccccaaccatagcggccttgtgaccttccaagccttcatcgacttcatgtcgcgggagaccaccgacacggacacggctgaccaggtcatcgcttccttcaaggtcttagcaggggacaagaacttcatcacagctgaggagctgcggagagagctgccccccgaccaggccgagtactgcatcgcccgcatggcgccataccagggccctgacgccgtgcccggtgccctcgactacaagtccttctccacggccttgtatggcgagagcgacctgtgaggccccagagacctgacccaacacccccgacggcctccaggaactgcctgggccatgcgaggggccagcagagggcgccaccaccacctgacggctggggacccacccagcccctctcccctctctgctccagactcacttgccattgccaggagatggccccaacaagcaccccgcttttgcagcagaggagctgagttggcagaccgggcccccctgaaccgcaccccatcccaccagccccgggccttgctttgtctgggcctcacgtgtctcagattttctagaaccaaaaaaaaaaaaggaaaaaaaacacaaaacat

SEQ ID NO: 355 - DNA, 1127 bp, Homo Sapiens
  misc_feature (1)..(1): n is a, c, g, or t
  misc_feature (689)..(689): n is a, c, g, or t
  misc_feature (751)..(751): n is a, c, g, or t
  misc_feature (759)..(759): n is a, c, g, or t
  misc_feature (763)..(763): n is a, c, g, or t
  misc_feature (780)..(780): n is a, c, g, or t
  misc_feature (786)..(786): n is a, c, g, or t
  misc_feature (830)..(830): n is a, c, g, or t
  misc_feature (849)..(849): n is a, c, g, or t
  misc_feature (863)..(863): n is a, c, g, or t
  misc_feature (874)..(874): n is a, c, g, or t
  misc_feature (879)..(879): n is a, c, g, or t
  misc_feature (896)..(896): n is a, c, g, or t
  misc_feature (900)..(900): n is a, c, g, or t
  misc_feature (908)..(908): n is a, c, g, or t
  misc_feature (910)..(910): n is a, c, g, or t
  misc_feature (915)..(915): n is a, c, g, or t
  misc_feature (929)..(930): n is a, c, g, or t
  misc_feature (936)..(937): n is a, c, g, or t
  misc_feature (967)..(967): n is a, c, g, or t
  misc_feature (981)..(981): n is a, c, g, or t
  misc_feature (983)..(984): n is a, c, g, or t
  misc_feature (987)..(989): n is a, c, g, or t
  misc_feature (991)..(992): n is a, c, g, or t
  misc_feature (997)..(997): n is a, c, g, or t
  misc_feature (1001)..(1001): n is a, c, g, or t
  misc_feature (1003)..(1003): n is a, c, g, or t
  misc_feature (1007)..(1007): n is a, c, g, or t
  misc_feature (1018)..(1018): n is a, c, g, or t
  misc_feature (1025)..(1025): n is a, c, g, or t
  misc_feature (1031)..(1031): n is a, c, g, or t
  misc_feature (1038)..(1038): n is a, c, g, or t
  misc_feature (1040)..(1040): n is a, c, g, or t
  misc_feature (1044)..(1044): n is a, c, g, or t
  misc_feature (1053)..(1053): n is a, c, g, or t
  misc_feature (1060)..(1060): n is a, c, g, or t
  misc_feature (1091)..(1091): n is a, c, g, or t
  misc_feature (1098)..(1098): n is a, c, g, or t
  misc_feature (1104)..(1106): n is a, c, g, or t
  misc_feature (1113)..(1113): n is a, c, g, or t
naaatagagaaattactatgagaggatcgcatcaccatcaccatcacggatcctatttaggtgacactatagaatcgtcgacccacgcgtccggacaccgggtgtagagggcggtcgcggcgggcagtggcggcagaatgttggctaccagggtatttagcctagttggcaagcgagcaatttccacctctgtgtgtgtacgagctcatgaaagtgttgtgaagagcgaagacttttcgctcccagcttatatggatcggcgtgaccaccccttgccggaggtggcccatgtcaagcacctgtctgccagccagaaggcactgaaggagaaggagaaggcctcctggagcagcctctccatggatgagaaagtcgagtgtgggtattgaagggacccacaggcgcgcccagcagctctcggaagcgtgtgtgtgacagagcctctgctcacttctgggcctactgtctagagagcagtcttgcacaggagggttgctctgctgggtttcggggtcactgtgccagggccccagtttatgtgctcaccagtcacttagctctgccagctgacaggatcttttgctgggcccccttctctgtgctgagtggaggtagcctctcagcatatctgctgggtaaagacatagttaactgtaaattattgaaaagaaactcagcaaaatgcatanttgttttggtatgaaaggggcagaaaaataacaagattaaatagaccctaatactgtaattncaagtaanaaanaaattttgcagttttantttgcncctgaacgaactgaatgcattttcttccttccttgccctgtcanatgcctgcgtgggcacgtntgggccccgttatntggcgtgaaanatgangtggcctggccttgggngtancccttcancncctgngttttcctcccttnnaaaatnnggtttttggggaaaaaaatggtttaaaatntttccaaaaaaaangnnaannncnnaaacntttngngccnggtaaaaaggnttttccncccctnccccccnanggtnttccccatnaaatttnaaaagaaaaacttttttttaaaaaaaaaagngcccccnaaaaannnaaaaaanagtttttgggcggg

SEQ ID NO: 356 - DNA, 1047 bp, Homo Sapiens
  misc_feature (2)..(2): n is a, c, g, or t
  misc_feature (843)..(843): n is a, c, g, or t
  misc_feature (866)..(866): n is a, c, g, or t
  misc_feature (869)..(869): n is a, c, g, or t
  misc_feature (874)..(874): n is a, c, g, or t
  misc_feature (898)..(898): n is a, c, g, or t
  misc_feature (908)..(908): n is a, c, g, or t
  misc_feature (941)..(941): n is a, c, g, or t
  misc_feature (957)..(957): n is a, c, g, or t
  misc_feature (967)..(967): n is a, c, g, or t
  misc_feature (983)..(983): n is a, c, g, or t
  misc_feature (992)..(992): n is a, c, g, or t
  misc_feature (1013)..(1013): n is a, c, g, or t
  misc_feature (1022)..(1022): n is a, c, g, or t
  misc_feature (1044)..(1044): n is a, c, g, or t
antagagaaattaactatgagaggatcgcatcaccatcaccatcacggatcctatttaggtgacactatagaatcgtcgacccacgcgtccggcttcctggatgacaaccaaatcatcaccagctctggggataccacctgtgccctgtgggacattgagacaggccagcagacagtgggttttgctggacacagtggggatgtgatgtccctgtccctggcccccgatggccgcacgtttgtgtcaggcgcctgtgatgcctctatcaagctgtgggacgtgcgggattccatgtgccgacagaccttcatcggccatgaatccgacatcaatgcagtggctttcttccccaacggctacgccttcaccaccggctctgacgacgccacgtgccgcctcttcgacctgcgggccgatcaggagctcctcatgtactcccatgacaacatcatctgtggcatcacctctgttgccttctcgcgcagcggacggctgctgctcgctggctacgacgacttcaactgcaacatctgggatgccatgaagggcgaccgtgcaggagtcctcgctggccacgacaaccgcgtgagctgcctcggggtcaccgacgatggcatggctgtggccacgggctcctgggactccttcctcaagatctggaactaatggccccacccccactgggcccaggccaggaggggccctgcccatgcccacactacaggccagggctgcggggctggcgcaatcccagcccccttccccgggccacggggccttgggtccctgccctcccacccaggtttggttcctcccggggcccccactgtggagataaaaangggaatggaatgggggaaaaagnagnaacangaaggcccctcatccttctgctgncctggggttnggggcctcacccctctggaagggccggaagcangaggtggaaaaccccnaggggctggntttttttaaaactggntttaatttnaatttttaataaaattttcantttttccanaaaaggaaccaattccaacctntgt

SEQ ID NO: 357 - DNA, 1211 bp, Homo Sapiens
  misc_feature (852)..(852): n is a, c, g, or t
  misc_feature (890)..(890): n is a, c, g, or t
  misc_feature (895)..(895): n is a, c, g, or t
  misc_feature (921)..(921): n is a, c, g, or t
  misc_feature (931)..(931): n is a, c, g, or t
  misc_feature (942)..(942): n is a, c, g, or t
  misc_feature (963)..(963): n is a, c, g, or t
  misc_feature (966)..(966): n is a, c, g, or t
  misc_feature (973)..(973): n is a, c, g, or t
  misc_feature (977)..(977): n is a, c, g, or t
  misc_feature (984)..(984): n is a, c, g, or t
  misc_feature (991)..(991): n is a, c, g, or t
  misc_feature (996)..(996): n is a, c, g, or t
  misc_feature (1001)..(1001): n is a, c, g, or t
  misc_feature (1004)..(1004): n is a, c, g, or t
  misc_feature (1025)..(1025): n is a, c, g, or t
  misc_feature (1031)..(1031): n is a, c, g, or t
  misc_feature (1036)..(1036): n is a, c, g, or t
  misc_feature (1047)..(1047): n is a, c, g, or t
  misc_feature (1059)..(1059): n is a, c, g, or t
  misc_feature (1061)..(1061): n is a, c, g, or t
  misc_feature (1063)..(1063): n is a, c, g, or t
  misc_feature (1066)..(1066): n is a, c, g, or t
  misc_feature (1075)..(1075): n is a, c, g, or t
  misc_feature (1094)..(1094): n is a, c, g, or t
  misc_feature (1108)..(1108): n is a, c, g, or t
  misc_feature (1111)..(1111): n is a, c, g, or t
  misc_feature (1113)..(1114): n is a, c, g, or t
  misc_feature (1124)..(1124): n is a, c, g, or t
  misc_feature (1128)..(1128): n is a, c, g, or t
  misc_feature (1130)..(1130): n is a, c, g, or t
  misc_feature (1144)..(1144): n is a, c, g, or t
  misc_feature (1149)..(1149): n is a, c, g, or t
  misc_feature (1154)..(1154): n is a, c, g, or t
  misc_feature (1156)..(1156): n is a, c, g, or t
  misc_feature (1161)..(1161): n is a, c, g, or t
  misc_feature (1164)..(1164): n is a, c, g, or t
  misc_feature (1168)..(1168): n is a, c, g, or t
  misc_feature (1174)..(1174): n is a, c, g, or t
  misc_feature (1183)..(1185): n is a, c, g, or t
  misc_feature (1195)..(1195): n is a, c, g, or t
gagaaattactatgagaggatcgcatcaccatcaccatcacggatcctatttaggtgacactatagaatcgtcgacccacgcgtccgctgctcctgccgctcccgctgccgcgcctcctgcggagaaggcccctgtaaagaagaaggcggccaaaaaggctgggggtacgcctcgtaaggcgtccggtcccccggtgtcagagctcatcaccaaggctgtggccgcctctaaagagcgtagcggagtttctctggctgctctgaaaaaagcgttggctgccgccggctatgatgtggagaaaaacaacagccgtatcaaacttggtctcaagagcctggtgagcaagggcactctggtgcaaacgaaaggcaccggtgcttctggctcctttaaactcaacaagaaggcagcctccggggaagccaagcccaaggttaaaaaggcgggcggaaccaaacctaagaagccagttggggcagccaagaagcccaagaaggcggctggcggcgcaactccgaagaagagcgctaagaaaacaccgaagaaagcgaagaagccggccgcggccactgtaaccaagaaagtggctaagagcccaaagaaggccaaggttgcgaagcccaagaaagctgccaaaagtgctgctaaggctgtgaagccgaaggccgctaagcccaaggttgtcaagcctaagaaggcggcgcccaagaagaaataggcgaacgcctacttctaaaacccaaaaggctcttttcagagccaccactgatctcaataaaagagctggataatttctttactatctgccttttcttgttctgccctgttacttaaggttagtcgtatggganttactgaggtatcaaaaacaaattgggtgacggggttngaaantggccgtggtgaggttacagcatttnaacctttatngcggcttctangtccctgaccggaggcttttntcnctggcgnatgnttttggnatggcantcccnccccnagncctgtgaacggcaaaaaaacncaaaanaaaanccattttttantctaagggattncngnatngactaaaanttttcaaaatcccccctgntcccgggtgggccnttntnnaaaaaaagantttntncggaattaatgganggggnaaaantngcttnttngggntttttncttacgggnnntaaaattttncccttttcttttaata

SEQ ID NO: 358 - DNA, 1179 bp, Homo Sapiens
  misc_feature (753)..(753): n is a, c, g, or t
  misc_feature (858)..(858): n is a, c, g, or t
  misc_feature (876)..(876): n is a, c, g, or t
  misc_feature (898)..(898): n is a, c, g, or t
  misc_feature (905)..(905): n is a, c, g, or t
  misc_feature (925)..(925): n is a, c, g, or t
  misc_feature (936)..(936): n is a, c, g, or t
  misc_feature (946)..(946): n is a, c, g, or t
  misc_feature (949)..(949): n is a, c, g, or t
  misc_feature (966)..(966): n is a, c, g, or t
  misc_feature (1001)..(1001): n is a, c, g, or t
  misc_feature (1003)..(1003): n is a, c, g, or t
  misc_feature (1011)..(1011): n is a, c, g, or t
  misc_feature (1024)..(1024): n is a, c, g, or t
  misc_feature (1027)..(1028): n is a, c, g, or t
  misc_feature (1033)..(1033): n is a, c, g, or t
  misc_feature (1037)..(1037): n is a, c, g, or t
  misc_feature (1063)..(1063): n is a, c, g, or t
  misc_feature (1065)..(1065): n is a, c, g, or t
  misc_feature (1080)..(1080): n is a, c, g, or t
  misc_feature (1084)..(1084): n is a, c, g, or t
  misc_feature (1096)..(1096): n is a, c, g, or t
  misc_feature (1105)..(1105): n is a, c, g, or t
  misc_feature (1107)..(1107): n is a, c, g, or t
  misc_feature (1117)..(1117): n is a, c, g, or t
  misc_feature (1124)..(1124): n is a, c, g, or t
  misc_feature (1127)..(1127): n is a, c, g, or t
  misc_feature (1130)..(1130): n is a, c, g, or t
  misc_feature (1132)..(1132): n is a, c, g, or t
  misc_feature (1142)..(1142): n is a, c, g, or t
  misc_feature (1146)..(1146): n is a, c, g, or t
  misc_feature (1151)..(1151): n is a, c, g, or t
  misc_feature (1173)..(1173): n is a, c, g, or t
  misc_feature (1175)..(1178): n is a, c, g, or t
gaatagagagaattactatgagaggatcgcatcaccatcaccatcacggatcctatttaggtgacactatagaatcgtcgacccacgcgtccgaagaaatcctgacccgcctgggagtggagccgtccgatgatgactgtgtctcagtccagcacgtttgcaccattgtctcatttcgctcagccaacttggtggctgccacactgggcgccatcttgaaccgcctgcgtgataacaagggcacacccaggctgcggaccacggttggtgtcgacggatctctttacaagacgcacccacagtattcccggcgtttccacaagactctaaggcgcttggtgccagactccgatgtgcgcttcctcctctcggagagtggcagcggcaagggggctgccatggtgacggcggtggcctaccgcttggccgagcagcaccggcagatagaggagaccctggctcatttccacctcaccaaagacatgctgctggaggtgaagaagaggatgcgggccgagatggagctggggctgaggaagcagacgcacaacaatgccgtggttaagatgctgccctccttcgtccggagaactcccgacgggaccgagaatggtgacttcttggccctggatcttggaggaaccaatttccgtgtgctgctggtgaaaatccgtagtgggaaaaagagaacggtggaaatgcacaacaagatctacgccattcctattgaaatcatgcagggcactggggaanagctgtttgatcacattgtctcctgcatctctgacttcttggactacatggggatcaaaggccccaggatgcctctggggcttcacgttctcatttccctgccancaaaacgaagtctggacncgggaatcttgatcacgtgaanaaagggnttttaaagcaacaaaactgncgttgggcccncgaatgtaantcnccttaattaaagggatnccaataaaaaaaggaaaagagaaatttgaacctgnangtggtggnttgtggtccaacnaannaaggnggcnacaatgataacctggggtttaaaagnancccccctggtaagtngganctcatttttggnaccgggcancnattgcctgtntaattgnaanaananaaaaacgtgnaaanggggnaagggggacaagggcaaaattncnnnna

SEQ ID NO: 359 - DNA, 1245 bp, Homo Sapiens
  misc_feature (839)..(839): n is a, c, g, or t
  misc_feature (859)..(859): n is a, c, g, or t
  misc_feature (875)..(875): n is a, c, g, or t
  misc_feature (884)..(884): n is a, c, g, or t
  misc_feature (926)..(926): n is a, c, g, or t
  misc_feature (932)..(932): n is a, c, g, or t
  misc_feature (948)..(948): n is a, c, g, or t
  misc_feature (976)..(976): n is a, c, g, or t
  misc_feature (989)..(989): n is a, c, g, or t
  misc_feature (994)..(994): n is a, c, g, or t
  misc_feature (1009)..(1009): n is a, c, g, or t
  misc_feature (1026)..(1026): n is a, c, g, or t
  misc_feature (1047)..(1047): n is a, c, g, or t
  misc_feature (1051)..(1051): n is a, c, g, or t
  misc_feature (1053)..(1053): n is a, c, g, or t
  misc_feature (1058)..(1058): n is a, c, g, or t
  misc_feature (1062)..(1062): n is a, c, g, or t
  misc_feature (1064)..(1064): n is a, c, g, or t
  misc_feature (1091)..(1091): n is a, c, g, or t
  misc_feature (1103)..(1103): n is a, c, g, or t
  misc_feature (1111)..(1111): n is a, c, g, or t
  misc_feature (1115)..(1115): n is a, c, g, or t
  misc_feature (1134)..(1135): n is a, c, g, or t
  misc_feature (1144)..(1144): n is a, c, g, or t
  misc_feature (1149)..(1149): n is a, c, g, or t
  misc_feature (1152)..(1153): n is a, c, g, or t
  misc_feature (1160)..(1160): n is a, c, g, or t
  misc_feature (1167)..(1167): n is a, c, g, or t
  misc_feature (1174)..(1174): n is a, c, g, or t
  misc_feature (1176)..(1177): n is a, c, g, or t
  misc_feature (1180)..(1180): n is a, c, g, or t
  misc_feature (1186)..(1186): n is a, c, g, or t
  misc_feature (1197)..(1197): n is a, c, g, or t
  misc_feature (1210)..(1211): n is a, c, g, or t
  misc_feature (1213)..(1214): n is a, c, g, or t
  misc_feature (1232)..(1232): n is a, c, g, or t
  misc_feature (1236)..(1236): n is a, c, g, or t
  misc_feature (1242)..(1242): n is a, c, g, or t
tagagaaattactatgagaggatcgcatcaccatcaccatcacggatcctatttaggtgacactatagaatcgtcgacccacgcgtccgggcaggggcggcccaaggcccagcaccaagatccaggcttgggggggacccaggagggtgcgaggggtgaagcaaccaaacgcagtccatccccagaggagaaggcctctcgctgcctcatcctctgaacaccgggcccaacctgatctgatccagatcttgactggggggtctgactcactgtgggaagagaagaggggagtatcctgagttgtaggaactgctttccaactccaagctccctccacaagtttccctcccaggccccccacaccccagtgtggacttgggatttgctgtgctcagcccagggctgataggtccctggtgaagcccagggtggggggtgtcagggcagtggaggggcccgaggagccaggttgcatttattggatggggagctccaaggggcattagtggtttgggctgggccttttgtgccctggtactctgccacctgtgttgctgatggtgtcaaggaaggaggacttggcctagggttgtctgagccggagccggcagctccactggagagcagtgcaggcagagtggagcctcctgctctcctggaccagctgcagacccccaaccctggtttctgtgccatgttgcgctctgaccgtctctgttgcttctcttctggtgttgcttctcctccctcccattctctctgcaactccctgcgggccgcatcgcttgctttcactgccgtctggctaggactcccttcttccttccttccccgagaangcctcaatgtggcgaggaanatgctggggccggtanggctgtganatcttctggggaggctagccgggtggggcgggagcctctcanctgtcnaaattcaaaactggancccactcctcctcctctcgttgcctcancctgccctcaccntcagnactaggcaaaaattnttctgaactggatgccnggttccaaaatccctgcacanttcnanagganagcncnttccccatgccctgggagggaccctcntttttcccctcnccatgctnatgnaaacccggcctggttgccnntggggcccngtggnaanngcaaaantttaacngggcccncnntcntggggnttggggcggcnccgggaaaaaaanncnnaaagggggggcccgcccntttntaaaanccc

SEQ ID NO: 360 - DNA, 1354 bp, Homo Sapiens
  misc_feature (2)..(2): n is a, c, g, or t
  misc_feature (9)..(9): n is a, c, g, or t
  misc_feature (929)..(929): n is a, c, g, or t
  misc_feature (949)..(949): n is a, c, g, or t
  misc_feature (959)..(959): n is a, c, g, or t
  misc_feature (971)..(971): n is a, c, g, or t
  misc_feature (999)..(999): n is a, c, g, or t
  misc_feature (1003)..(1003): n is a, c, g, or t
  misc_feature (1014)..(1014): n is a, c, g, or t
  misc_feature (1032)..(1032): n is a, c, g, or t
  misc_feature (1041)..(1041): n is a, c, g, or t
  misc_feature (1070)..(1070): n is a, c, g, or t
  misc_feature (1077)..(1077): n is a, c, g, or t
  misc_feature (1081)..(1081): n is a, c, g, or t
  misc_feature (1089)..(1090): n is a, c, g, or t
  misc_feature (1103)..(1103): n is a, c, g, or t
  misc_feature (1107)..(1107): n is a, c, g, or t
  misc_feature (1115)..(1115): n is a, c, g, or t
  misc_feature (1122)..(1122): n is a, c, g, or t
  misc_feature (1125)..(1125): n is a, c, g, or t
  misc_feature (1130)..(1130): n is a, c, g, or t
  misc_feature (1136)..(1136): n is a, c, g, or t
  misc_feature (1141)..(1141): n is a, c, g, or t
  misc_feature (1149)..(1149): n is a, c, g, or t
  misc_feature (1157)..(1157): n is a, c, g, or t
  misc_feature (1163)..(1163): n is a, c, g, or t
  misc_feature (1171)..(1171): n is a, c, g, or t
  misc_feature (1174)..(1174): n is a, c, g, or t
  misc_feature (1176)..(1176): n is a, c, g, or t
  misc_feature (1182)..(1182): n is a, c, g, or t
  misc_feature (1190)..(1190): n is a, c, g, or t
  misc_feature (1201)..(1202): n is a, c, g, or t
  misc_feature (1206)..(1206): n is a, c, g, or t
  misc_feature (1221)..(1221): n is a, c, g, or t
  misc_feature (1228)..(1228): n is a, c, g, or t
  misc_feature (1233)..(1233): n is a, c, g, or t
  misc_feature (1246)..(1246): n is a, c, g, or t
  misc_feature (1248)..(1248): n is a, c, g, or t
  misc_feature (1250)..(1250): n is a, c, g, or t
  misc_feature (1262)..(1262): n is a, c, g, or t
  misc_feature (1264)..(1264): n is a, c, g, or t
  misc_feature (1275)..(1275): n is a, c, g, or t
  misc_feature (1290)..(1290): n is a, c, g, or t
  misc_feature (1306)..(1306): n is a, c, g, or t
  misc_feature (1319)..(1319): n is a, c, g, or t
  misc_feature (1326)..(1326): n is a, c, g, or t
  misc_feature (1328)..(1329): n is a, c, g, or t
  misc_feature (1331)..(1332): n is a, c, g, or t
  misc_feature (1336)..(1336): n is a, c, g, or t
  misc_feature (1342)..(1342): n is a, c, g, or t
antagaggnaattactatgagaggatcgcatcaccatcaccatcacggatcctatttaggtgacactatagaatcgtcgacccacgcgtccgccgatatttggagttcttacaacatggcagacattgacaacaaagaacagtctgaacttgatcaagatttggatgatgttgaagaagtagaagaagaggaaactggtgaagaaacaaaactcaaagcacgtcagctaactgttcagatgatgcaaaatcctcagattcttgcagcccttcaagaaagacttgatggtctggtagaaacaccaacaggatacattgaaagcctgcctagggtagttaaaagacgagtgaatgctctcaaaaacctgcaagttaaatgtgcacagatagaagccaaattctatgaggaagttcatgatcttgaaaggaagtatgctgttctctatcagcctctatttgataagcgatttgaaattattaatgcaatttatgaacctacggaagaagaatgtgaatggaaaccagatgaagaagatgagatttcggaggaattgaaagaaaaggccaagattgaagatgagaaaaaggatgaagaaaaagaagaccccaaaggaattcctgaattttggttaactgtttttaagaatgttgacttgctcagtgatatggttcaggaacacgatgaacctattctgaagcacttgaaagatattaaagtgaagttctcagatgctggccagcctatgagttttgtcttagaatttcactttgaacccaatgaatattttacaaatgaagtgctgacaaagacatacaggatgaggtcagaaccagatgattctgatcccttttcttttgatggaccagaaattatgggttgtacaggggtgccagatagattggaaaaaaaggaaaagaatgtccctttgnaaactattaagaaagaagcngaaaccccangggacggggacngttcgtactgtggactaaaccgtttccnaagncccctttcttnaacttttttgcccccccngaagttccngaaagtggaaattctggatgaagatgctnaaacctntccntgcctgcnnacttccaattggncccnttttacgnggcggtnaancccanatccgngtttntttttccnggaaaccntttggnaaaggggnggngntttgangaaaaggngaaaaccgganngggnattgtttcccaatgnccaaaantcccntgggttaaccctngnanccaatggaggcntntggttccctgncaaacccccgggatnggaaaaaccttggaancgggtttttattnccccccncnngnngaanggtccnaaaattcccccc

SEQ ID NO: 361 - DNA, 1289 bp, Homo Sapiens
  misc_feature (889)..(889): n is a, c, g, or t
  misc_feature (942)..(942): n is a, c, g, or t
  misc_feature (944)..(944): n is a, c, g, or t
  misc_feature (957)..(957): n is a, c, g, or t
  misc_feature (969)..(969): n is a, c, g, or t
  misc_feature (980)..(980): n is a, c, g, or t
  misc_feature (988)..(988): n is a, c, g, or t
  misc_feature (992)..(992): n is a, c, g, or t
  misc_feature (1025)..(1025): n is a, c, g, or t
  misc_feature (1033)..(1033): n is a, c, g, or t
  misc_feature (1055)..(1055): n is a, c, g, or t
  misc_feature (1066)..(1066): n is a, c, g, or t
  misc_feature (1101)..(1101): n is a, c, g, or t
  misc_feature (1108)..(1108): n is a, c, g, or t
  misc_feature (1120)..(1120): n is a, c, g, or t
  misc_feature (1122)..(1122): n is a, c, g, or t
  misc_feature (1125)..(1125): n is a, c, g, or t
  misc_feature (1128)..(1128): n is a, c, g, or t
  misc_feature (1134)..(1134): n is a, c, g, or t
  misc_feature (1146)..(1146): n is a, c, g, or t
  misc_feature (1151)..(1151): n is a, c, g, or t
  misc_feature (1159)..(1159): n is a, c, g, or t
  misc_feature (1166)..(1166): n is a, c, g, or t
  misc_feature (1172)..(1172): n is a, c, g, or t
  misc_feature (1177)..(1177): n is a, c, g, or t
  misc_feature (1179)..(1179): n is a, c, g, or t
  misc_feature (1184)..(1184): n is a, c, g, or t
  misc_feature (1191)..(1191): n is a, c, g, or t
  misc_feature (1195)..(1195): n is a, c, g, or t
  misc_feature (1199)..(1200): n is a, c, g, or t
  misc_feature (1211)..(1211): n is a, c, g, or t
  misc_feature (1214)..(1214): n is a, c, g, or t
  misc_feature (1217)..(1217): n is a, c, g, or t
  misc_feature (1237)..(1237): n is a, c, g, or t
  misc_feature (1247)..(1247): n is a, c, g, or t
  misc_feature (1257)..(1257): n is a, c, g, or t
  misc_feature (1261)..(1261): n is a, c, g, or t
  misc_feature (1269)..(1269): n is a, c, g, or t
  misc_feature (1277)..(1277): n is a, c, g, or t
  misc_feature (1281)..(1281): n is a, c, g, or t
  misc_feature (1286)..(1286): n is a, c, g, or t
tagagaaattactatgagaggatcgcatcaccatcaccatcacggatcctatttaggtgacactatagaatcgtcgacccacgcgtccgcccacgcgtccgatttggatgggaaacatgtggtgtttggccaagtaattaaaggaataggagtggcaaggatattggaaaatgtggaagtgaaaggtgaaaaacctgctaaattgtgcgttattgcagaatgtggagaattgaaggaaggagatgacgggggaatattcccaaaagatggctctggcgacagtcatccagatttccctgaggatgcggatatagatttaaaagatgtagataaaattttattaataacagaagacttaaaaaacattggaaatacttttttcaaatcccagaactgggagatggctattaaaaaatatgcagaagttttaagatacgtggacagttcaaaggctgttattgagacagcagatagagccaagctgcaacctatagctttaagctgtgtactgaatattggtgcttgtaaactgaagatgtcaaattggcagggagcaattgacagttgtttagaggctcttgaactagacccatcaaataccaaagcattgtaccgcagagctcaaggatggcaaggattaaaagaatatgatcaagcattggctgatcttaagaaagctcaggggatagcaccagaagataaagctatccaggcagaattgctgaaagtcaaacaaaagataaaggcacagaaagataaagagaaggcagtatatgcaaaaatgtttgcttagaaaggattcagttttgcttattgtgtgttgattgtataaatgcaataagaaaatgtaaaggtttttgtctatgaatatgatccctaatgtgtttcntttgacaccttagttccttactgtttacagtttaggagtactgatagggggtncntgcttaataaacntgtcccaatacngtaagtaaagnggttttgnttgnttcctttgaaatggagtcttgctctgtcccccnggctggangcgggggcgcaatcccggctcnctgcatccccnggccccccggggtccaagcaattcccccgcccccncctcccnagtagctgggantnacnggncccggncccccccccccncctantttttgtntttttanaaaaanggggntnccccnaattggncccncccnntgggcctgaanccntgnccctgggacccccccccccntggccccccnaagggggggnaaanggggggancccccccncccnccccnaaa

SEQ ID NO: 362 - DNA, 1323 bp, Homo Sapiens
  misc_feature (1)..(1): n is a, c, g, or t
  misc_feature (942)..(942): n is a, c, g, or t
  misc_feature (954)..(954): n is a, c, g, or t
  misc_feature (957)..(957): n is a, c, g, or t
  misc_feature (987)..(987): n is a, c, g, or t
  misc_feature (989)..(989): n is a, c, g, or t
  misc_feature (1008)..(1008): n is a, c, g, or t
  misc_feature (1010)..(1010): n is a, c, g, or t
  misc_feature (1013)..(1013): n is a, c, g, or t
  misc_feature (1025)..(1025): n is a, c, g, or t
  misc_feature (1033)..(1033): n is a, c, g, or t
  misc_feature (1041)..(1041): n is a, c, g, or t
  misc_feature (1057)..(1057): n is a, c, g, or t
  misc_feature (1074)..(1074): n is a, c, g, or t
  misc_feature (1076)..(1076): n is a, c, g, or t
  misc_feature (1079)..(1079): n is a, c, g, or t
  misc_feature (1103)..(1103): n is a, c, g, or t
  misc_feature (1107)..(1107): n is a, c, g, or t
  misc_feature (1123)..(1123): n is a, c, g, or t
  misc_feature (1127)..(1127): n is a, c, g, or t
  misc_feature (1138)..(1138): n is a, c, g, or t
  misc_feature (1148)..(1148): n is a, c, g, or t
  misc_feature (1160)..(1160): n is a, c, g, or t
  misc_feature (1169)..(1169): n is a, c, g, or t
  misc_feature (1174)..(1174): n is a, c, g, or t
  misc_feature (1189)..(1189): n is a, c, g, or t
  misc_feature (1194)..(1194): n is a, c, g, or t
  misc_feature (1216)..(1217): n is a, c, g, or t
  misc_feature (1220)..(1220): n is a, c, g, or t
  misc_feature (1226)..(1226): n is a, c, g, or t
  misc_feature (1235)..(1235): n is a, c, g, or t
  misc_feature (1242)..(1242): n is a, c, g, or t
  misc_feature (1244)..(1244): n is a, c, g, or t
  misc_feature (1250)..(1251): n is a, c, g, or t
  misc_feature (1253)..(1253): n is a, c, g, or t
  misc_feature (1258)..(1258): n is a, c, g, or t
  misc_feature (1268)..(1269): n is a, c, g, or t
  misc_feature (1281)..(1281): n is a, c, g, or t
  misc_feature (1286)..(1286): n is a, c, g, or t
  misc_feature (1296)..(1296): n is a, c, g, or t
  misc_feature (1300)..(1301): n is a, c, g, or t
  misc_feature (1314)..(1315): n is a, c, g, or t
nagaggaaattactatgagaggatcgcatcaccatcaccatcacggatcctatttaggtgacactatagaatcgtcgacccacgcgtccggttttggttcagttagtggaaaaattgaaatagaaatcaagatcaaccatgaaggagaagtaaacagggcccgttatatgccccagaacccttgtatcatcgcaacaaagactccttccagtgatgttcttgtctttgactatacaaaacatccttctaaaccagatccttctggagagtgcaacccagacttgcgtctccgtggacatcagaaggaaggctatgggctttcttggaacccaaatctcagtgggcacttacttagtgcttcagatgaccataccatctgcctgtgggacatcagtgccgttccaaaggagggaaaagtggtagatgcgaagaccatctttacagggcatacggcagtagtagaagatgtttcctggcatctactccatgagtctctgtttgggtcagttgctgatgatcagaaacttatgatttgggatactcgttcaaacaatacttccaaaccaagccactcagttgatgctcacactgctgaagtgaactgcctttctttcaatccttatagtgagttcattcttgccacaggatcagctgacaagactgttgccttgtgggatctgagaaatctgaaacttaagttgcattcctttgagtcacataaggatgaaatattccaggttcagtggtcacctcacaatgagactattttagcttccagtggtactgatcgcagactgaatgtctgggatttaagtaaaattggagaggaacaatccccagaagatgcagaagacgggccaccagagttgttgtttattcatggtggtcatactgccaagatatctgatttctcctggaatcccaatgaaccttgggtgattngttctgtatcanaanacaatatcatgcaagtgtggcaaatggcananaacatttataatgatgaananccnggaaggaagcgnggatccanaaggacangggcccaaaaaaggcnttacttggtgggatttnanacnccccttttttcttcccaccctganaggnatttaaccctggtttngaanaaactttttcnccttcccccnaaaaaaaagganccccgaaangcttnaccccaaccgggggntttcnaaattaaaagggggctgttccnnaancccaantacgtgaantttcccngnattttnnancccgnctaaaacccnnaaggggaaaatnggggnaatttttttntagnnaacccccgttttnnacctttta

SEQ ID NO: 363 - DNA, 1179 bp, Homo Sapiens
  misc_feature (846)..(846): n is a, c, g, or t
  misc_feature (869)..(869): n is a, c, g, or t
  misc_feature (898)..(898): n is a, c, g, or t
  misc_feature (926)..(926): n is a, c, g, or t
  misc_feature (928)..(928): n is a, c, g, or t
  misc_feature (943)..(943): n is a, c, g, or t
  misc_feature (955)..(955): n is a, c, g, or t
  misc_feature (965)..(965): n is a, c, g, or t
  misc_feature (969)..(969): n is a, c, g, or t
  misc_feature (974)..(974): n is a, c, g, or t
  misc_feature (984)..(984): n is a, c, g, or t
  misc_feature (991)..(991): n is a, c, g, or t
  misc_feature (995)..(995): n is a, c, g, or t
  misc_feature (1011)..(1012): n is a, c, g, or t
  misc_feature (1017)..(1017): n is a, c, g, or t
  misc_feature (1025)..(1025): n is a, c, g, or t
  misc_feature (1038)..(1039): n is a, c, g, or t
  misc_feature (1046)..(1046): n is a, c, g, or t
  misc_feature (1057)..(1057): n is a, c, g, or t
  misc_feature (1060)..(1060): n is a, c, g, or t
  misc_feature (1063)..(1063): n is a, c, g, or t
  misc_feature (1065)..(1065): n is a, c, g, or t
  misc_feature (1072)..(1073): n is a, c, g, or t
  misc_feature (1089)..(1089): n is a, c, g, or t
  misc_feature (1094)..(1095): n is a, c, g, or t
  misc_feature (1105)..(1106): n is a, c, g, or t
  misc_feature (1125)..(1125): n is a, c, g, or t
  misc_feature (1127)..(1127): n is a, c, g, or t
  misc_feature (1132)..(1132): n is a, c, g, or t
  misc_feature (1140)..(1140): n is a, c, g, or t
  misc_feature (1142)..(1142): n is a, c, g, or t
  misc_feature (1163)..(1163): n is a, c, g, or t
  misc_feature (1169)..(1169): n is a, c, g, or t
  misc_feature (1174)..(1174): n is a, c, g, or t
tagagaaattactatgagaggatcgcatcaccatcaccatcacggatcctatttaggtgacactatagaatcgtcgacccacgcgtccgaagagaaggacctggagccctgggatgcaggtgaactcacagccaatgaggaacttgaggctttggaaaatgacgtatctaatggatgggatcccaatgatatgtttcgatataatgaagaaaattatggtgtagtgtctacgtatgatagcagtttatcttcgtatacagtgcccttagaaagagataactcagaagaatttttaaaacgggaagcaagggcaaaccagttagcagaagaaattgagtcaagtgcccagtacaaagctcgagtggccctggaaaatgatgataggagtgaggaagaaaaatacacagcagttcagagaaattccagtgaacgtgaggggcacagcataaacactagggaaaataaatatattcctcctggacaaagaaatagagaagtcatatcctggggaagtgggagacagaattcaccgcgtatgggccagcctggatcgggctccatgccatcaagatccacttctcacacttcagatttcaacccgaattctggttcagaccaaagagtagttaatggaggtgttccctggccatcgccttgcccatctccttcctctcgcccaccttctcgctaccagtcaggtcccaactctcttccacctcgggcagccacccctacacggccgccctccaggcccccctcgcggccatccagaccccccgtctcacccctctgctcatggttctccagctcctgtctctactatgcctaaacgcatgtcttcagaanggcctccaaggatgtccccaaanggcccagcgacatcctcgaaatcacagantttctgctgggaggggttccatatcccngnggcctaaaatttgtntcccccaacccncccagtgaanccanctacncctcccatancaagganccantcccccggggggaacnnggtcntcatgggncatgggggctaannattcccngcttccaaatncanagncnaacctcnncctgcggggaaaaaanaaaannttaaccccanngaaacttcccctaccttcncnaaagntgaaaacnangggtttcccccctttttttcnaacctnaaaanaattg

SEQ ID NO: 364 - DNA, 1143 bp, Homo Sapiens
  misc_feature (1)..(8): n is a, c, g, or t
  misc_feature (680)..(680): n is a, c, g, or t
  misc_feature (804)..(804): n is a, c, g, or t
  misc_feature (822)..(822): n is a, c, g, or t
  misc_feature (925)..(925): n is a, c, g, or t
  misc_feature (930)..(930): n is a, c, g, or t
  misc_feature (932)..(933): n is a, c, g, or t
  misc_feature (935)..(935): n is a, c, g, or t
  misc_feature (941)..(941): n is a, c, g, or t
  misc_feature (945)..(945): n is a, c, g, or t
  misc_feature (957)..(957): n is a, c, g, or t
  misc_feature (967)..(967): n is a, c, g, or t
  misc_feature (969)..(969): n is a, c, g, or t
  misc_feature (975)..(975): n is a, c, g, or t
  misc_feature (981)..(981): n is a, c, g, or t
  misc_feature (988)..(989): n is a, c, g, or t
  misc_feature (991)..(991): n is a, c, g, or t
  misc_feature (1001)..(1001): n is a, c, g, or t
  misc_feature (1015)..(1016): n is a, c, g, or t
  misc_feature (1018)..(1018): n is a, c, g, or t
  misc_feature (1029)..(1029): n is a, c, g, or t
  misc_feature (1033)..(1033): n is a, c, g, or t
  misc_feature (1042)..(1043): n is a, c, g, or t
  misc_feature (1052)..(1052): n is a, c, g, or t
  misc_feature (1075)..(1076): n is a, c, g, or t
  misc_feature (1078)..(1078): n is a, c, g, or t
  misc_feature (1082)..(1082): n is a, c, g, or t
  misc_feature (1091)..(1091): n is a, c, g, or t
  misc_feature (1127)..(1127): n is a, c, g, or t
  misc_feature (1137)..(1137): n is a, c, g, or t
  misc_feature (1142)..(1142): n is a, c, g, or t
nnnnnnnngaatagagaaattactatgagaggatcgcatcaccatcaccatcacggatcctatttaggtgacactatagaatcgtcgacccacgcgtccgcgaagttgccggaggggcgcgcaaagccacgaaaagcaaactttttgagtttctggtccatggggtgcgccccgggatgccgtctggagcccggatgccccaccagggggcgcccatgggccccccgggctccccgtacatgggcagccccgccgtgcgacccggcctggcccccgcgggcatggagcccgcccgcaagcgagcagcgcccccgcccgggcagagccaggcacagagccagggccagccggtgcccaccgcccccgcgcggagccgcagtgccaagaggaggaagatggctgacaaaatcctccctcaaaggattcgggagctggtccccgagtcccaggcttacatggacctcttggcatttgagaggaaactggatcaaaccatcatgcggaagcgggtggacatccaggaggctctgaagaggcccatgaagcaaaagcggaagctgcgactctatatctccaacacttttaaccctgcgaagcctgatgctgaggattccgacggcagcattgcctcctgggagctacgggtggaggggaagctcctggatgatcccagcaaacanaagcggaagttctcttctttcttcaagagtttggtcatcgagctggacaaagatctttatggccctgacaaccacctcgttgagtggcatcggacacccacgacccaggagacggacggcttcnaggtgaaaacggccctgnggacctgagtgtgcgctgcacgctgctcctcatgctggactaccagccttccccatttcaaactggatccccgccctaaccccggctgcttggggctgcacanacaananncncttaanccanttgtccaggccntgtggcattntnttaaanaccaanagggttnnangaactccccntgaaaaggaaatanntncattggggacnaatntttttcaannaaatttttnaatgttcccggcttaaaattttnntnaaanttccccaangccttcaaaagccctttcttttgcccccttgaaccnaatttttatnaaccnt

SEQ ID NO: 365 - DNA, 1178 bp, Homo Sapiens
  misc_feature (890)..(890): n is a, c, g, or t
  misc_feature (913)..(913): n is a, c, g, or t
  misc_feature (934)..(934): n is a, c, g, or t
  misc_feature (941)..(941): n is a, c, g, or t
  misc_feature (951)..(951): n is a, c, g, or t
  misc_feature (954)..(954): n is a, c, g, or t
  misc_feature (966)..(966): n is a, c, g, or t
  misc_feature (989)..(989): n is a, c, g, or t
  misc_feature (999)..(999): n is a, c, g, or t
  misc_feature (1003)..(1003): n is a, c, g, or t
  misc_feature (1005)..(1005): n is a, c, g, or t
  misc_feature (1016)..(1016): n is a, c, g, or t
  misc_feature (1025)..(1025): n is a, c, g, or t
  misc_feature (1037)..(1037): n is a, c, g, or t
  misc_feature (1040)..(1040): n is a, c, g, or t
  misc_feature (1043)..(1043): n is a, c, g, or t
  misc_feature (1056)..(1056): n is a, c, g, or t
  misc_feature (1059)..(1059): n is a, c, g, or t
  misc_feature (1061)..(1061): n is a, c, g, or t
  misc_feature (1064)..(1064): n is a, c, g, or t
  misc_feature (1068)..(1069): n is a, c, g, or t
  misc_feature (1077)..(1077): n is a, c, g, or t
  misc_feature (1082)..(1082): n is a, c, g, or t
  misc_feature (1087)..(1087): n is a, c, g, or t
  misc_feature (1091)..(1091): n is a, c, g, or t
  misc_feature (1093)..(1093): n is a, c, g, or t
  misc_feature (1098)..(1098): n is a, c, g, or t
  misc_feature (1100)..(1101): n is a, c, g, or t
  misc_feature (1104)..(1104): n is a, c, g, or t
  misc_feature (1126)..(1126): n is a, c, g, or t
  misc_feature (1129)..(1129): n is a, c, g, or t
  misc_feature (1132)..(1132): n is a, c, g, or t
  misc_feature (1144)..(1144): n is a, c, g, or t
  misc_feature (1156)..(1156): n is a, c, g, or t
  misc_feature (1165)..(1165): n is a, c, g, or t
  misc_feature (1168)..(1168): n is a, c, g, or t
  misc_feature (1177)..(1177): n is a, c, g, or t
gaatagagaaattactatgagaggatcgcatcaccatcaccatcacggatcctatttaggtgacactatagaatcgtcgacccacgcgtccgcccacgcgtccgcccacgcgtccgaaggacttcccagacgatgtcatccagtttgcgcggaaccaccccctcatgtacaactctgtcctgcccactggggggcgccctcttttcctacaagttggagccaattacaccttcactcaaattgccgcggaccgggttgcagccgctgacggacactatgacgtcctcttcattggcacagacgttggcacggtgctgaaggtgatctcggtccccaagggcagtaggcccagcgcagaggggctgctcctggaggagctgcacgtgtttgaggactcggccgctgtcaccagcatgcaaatttcttccaagaggcaccagctgtacgtagcctcgcggagcgcggtggcccagatcgcgttgcaccgctgcgctgcccacggccgcgtctgcaccgaatgctgtctggcgcgtgacccctactgcgcctgggacggggtcgcgtgcacgcgcttccagcccagtgccaagaggcggttccggcggcaagacgtaaggaatggcgaccccagcacgttgtgctccggagactcgtctcgtcccgcgctgctggaacacaaggtgttcggcgtggagggcagcagcgcctttctggagtgtgagccccgctcgctgcaggcgcgcgtggagtggactttccagcgcgcaggggtgacagcccacacccaggtgctggcagaggagcgcaccgagcgcaccgcccggggactactgctgcgcaggctgcggcgccgggactcgggcgtgtacttgtgcgccgccgtcgagcanggctttacgcaaccgctgcgtcncctgtcgctgcacgtgttgantgctacncaggccgaangantggcgcgggccnaagaagctgcgcccgccgcgccnccgggccccnaaantntggtacgggantttttgcanctggtggaaccnggncgnaagtggaaacccnaantnccntggnnatgtgccncccgnaaacntggncntgaantnntgnccctgggaattcccgaaaaaanggnccntaaccggaaganccccccccctgnaaccccccnctnaaagggggnc

SEQ ID NO: 366 - DNA, 1179 bp, Homo Sapiens
  misc_feature (836)..(836): n is a, c, g, or t
  misc_feature (873)..(873): n is a, c, g, or t
  misc_feature (875)..(875): n is a, c, g, or t
  misc_feature (930)..(930): n is a, c, g, or t
  misc_feature (932)..(932): n is a, c, g, or t
  misc_feature (948)..(948): n is a, c, g, or t
  misc_feature (956)..(956): n is a, c, g, or t
  misc_feature (970)..(970): n is a, c, g, or t
  misc_feature (985)..(986): n is a, c, g, or t
  misc_feature (992)..(992): n is a, c, g, or t
  misc_feature (994)..(994): n is a, c, g, or t
  misc_feature (1003)..(1003): n is a, c, g, or t
  misc_feature (1014)..(1014): n is a, c, g, or t
  misc_feature (1018)..(1018): n is a, c, g, or t
  misc_feature (1035)..(1035): n is a, c, g, or t
  misc_feature (1047)..(1047): n is a, c, g, or t
  misc_feature (1069)..(1069): n is a, c, g, or t
  misc_feature (1074)..(1075): n is a, c, g, or t
  misc_feature (1078)..(1078): n is a, c, g, or t
  misc_feature (1088)..(1088): n is a, c, g, or t
  misc_feature (1093)..(1093): n is a, c, g, or t
  misc_feature (1097)..(1097): n is a, c, g, or t
  misc_feature (1099)..(1099): n is a, c, g, or t
  misc_feature (1107)..(1107): n is a, c, g, or t
  misc_feature (1114)..(1114): n is a, c, g, or t
  misc_feature (1124)..(1124): n is a, c, g, or t
  misc_feature (1135)..(1135): n is a, c, g, or t
  misc_feature (1140)..(1141): n is a, c, g, or t
  misc_feature (1148)..(1148): n is a, c, g, or t
  misc_feature (1154)..(1154): n is a, c, g, or t
  misc_feature (1163)..(1163): n is a, c, g, or t
  misc_feature (1175)..(1175): n is a, c, g, or t
tagagaaattactatgagaggatcgcatcaccatcaccatcacggatcctatttaggtgacactatagaatcgtcgacccacgcgtccgcacagtctcctggggatggaagtgccttattactacttcacaagaaagcccgaagaagcagacagagaagacgaggtggagcctgggtgccaccacatccctcagatggtgtccaggagacccctgcgagactttgtggggctggaggactgcgacaaggccacccgggacgccatgctccacttcagcttctttgtcaccataggagacatggacgaagccttcaaatccatcaagctcatcaaaagtgaggccgtctgggagaacatggcgcgcatgtgcgtgaagacccagcggctggacgtggccaaggtgtgcctggggaacatgggccatgcccgcggggcccgagcgctgcgtgaggcggagcaggagccggagctagaggcccgcgtggccgtgctggccacgcagctgggcatgctggaggacgccgagcagctgtacaggaagtgcaagcgccacgacctcctgaacaagttctaccaggctgcgggccggtggcaggaggccctccaggtagccgagcaccacgatcgcgtgcacctgcgcagcacctaccaccgctatgccgggcacctggaggccagcgccgactgcagccgggccctcagttactacgagaagtcggacacgcaccgcttcgaggtgcccaggatgctgtcggaggacctgccgtccctggagctctacgtgaataaaatgaaggataagaccctgtggcggtggtgggcgcagtacctgganagccagggcgagatggacgccgcgctgcactactacnanctggcccgggaccacttctccctggtccgcatccactgcttccagggcaatgtcnanaaggctgcgcaaatanccaacganacaggaaacctggnggcctcctaccactnncccgcnantacaaaaanccaagaaagangtcnggcaggcggtgcacttntaaccccgggcnaggcctttcaaaatgccatccncctgnncangaaaaaggcntgaanaacnanctcagaanttggccntgcttaactncccccaagaanttatnnaaggggncccaanaataaaaanaaaaagggctgnaaaa

SEQ ID NO: 367 - DNA, 1184 bp, Homo Sapiens
  misc_feature (8)..(8): n is a, c, g, or t
  misc_feature (26)..(26): n is a, c, g, or t
  misc_feature (856)..(856): n is a, c, g, or t
  misc_feature (964)..(964): n is a, c, g, or t
  misc_feature (986)..(986): n is a, c, g, or t
  misc_feature (997)..(997): n is a, c, g, or t
  misc_feature (1001)..(1001): n is a, c, g, or t
  misc_feature (1025)..(1025): n is a, c, g, or t
  misc_feature (1027)..(1027): n is a, c, g, or t
  misc_feature (1037)..(1037): n is a, c, g, or t
  misc_feature (1039)..(1039): n is a, c, g, or t
  misc_feature (1049)..(1049): n is a, c, g, or t
  misc_feature (1051)..(1051): n is a, c, g, or t
  misc_feature (1077)..(1078): n is a, c, g, or t
  misc_feature (1097)..(1097): n is a, c, g, or t
  misc_feature (1104)..(1104): n is a, c, g, or t
  misc_feature (1117)..(1117): n is a, c, g, or t
  misc_feature (1125)..(1125): n is a, c, g, or t
  misc_feature (1134)..(1134): n is a, c, g, or t
  misc_feature (1148)..(1148): n is a, c, g, or t
  misc_feature (1153)..(1154): n is a, c, g, or t
  misc_feature (1156)..(1156): n is a, c, g, or t
  misc_feature (1165)..(1165): n is a, c, g, or t
  misc_feature (1167)..(1169): n is a, c, g, or t
  misc_feature (1171)..(1171): n is a, c, g, or t
  misc_feature (1175)..(1175): n is a, c, g, or t
  misc_feature (1177)..(1178): n is a, c, g, or t
  misc_feature (1182)..(1182): n is a, c, g, or t
tacccggngaaataactatgagaggncgcatcaccatcaccatcacggatcctatttaggtgacactatagaatcgtcgacccacgcgtccgcccacgcgtccgagcaggacccgaagcctaaattccaggagggtgagcgagtgctgtgctttcatgggcctcttctttatgaagcaaagtgtgtaaaggttgccataaaggacaaacaagtgaaatacttcatacattacagtggttggaataaaaattgggatgaatgggttccggagagcagagtactcaaatacgtggacaccaatttgcagaaacagcgagaacttcaaaaagccaatcagaaaacgaaaaagaacaaacagaaaacacctggaaatggagatggtggcagtaccagtgagacccctcagcctcctcggaagaaaagggcccgggtagatcctactgttgaaaatgaggaaacattcatgaacagagttgaagttaaagtaaagattcctgaagagctaaaaccgtggcttgttgatgactgggacttaattaccaggcaaaaacagctcttttatcttcctgccaagaagaatgtggattccattcttgaggattatgcaaattacaagaaatctcgtggaaacacagataataaggagtatgcggttaatgaagttgtggcagggataaaagaatacttcaacgtaatgttgggtacccagctactctataaatttgagagaccacagtatgctgaaattcttgcagatcatcccgatgcacccatgtcccaggtgtatggagcgccacatctcctgagattatttgtacgaattggagcaatgttggcttatacacctctggatganaagagccttgctttattactcaattatcttcacgatttcctaaagtacctggcaaagaattctgcaactttgttcagtgccagcgattatgaagtggctcctcctgantaccatcggaaagctgtgtganaggcactctcnctcncttatgtttggatctccgtaaacncnttttgttctnantctatctctngnacaaccatgtgctttgaaaatgttanngaaaacaattggaggttgntttcggnttgatttaaacanaaaaaaanaaagggggnaaaacccccttttnccccnncnttttttttncnnncnaaangnngccngg

SEQ ID NO: 368 - DNA, 1324 bp, Homo Sapiens
  misc_feature (852)..(852): n is a, c, g, or t
  misc_feature (861)..(861): n is a, c, g, or t
  misc_feature (869)..(869): n is a, c, g, or t
  misc_feature (900)..(900): n is a, c, g, or t
  misc_feature (914)..(914): n is a, c, g, or t
  misc_feature (940)..(940): n is a, c, g, or t
  misc_feature (950)..(950): n is a, c, g, or t
  misc_feature (967)..(967): n is a, c, g, or t
  misc_feature (984)..(984): n is a, c, g, or t
  misc_feature (992)..(992): n is a, c, g, or t
  misc_feature (1014)..(1014): n is a, c, g, or t
  misc_feature (1016)..(1016): n is a, c, g, or t
  misc_feature (1040)..(1040): n is a, c, g, or t
  misc_feature (1046)..(1046): n is a, c, g, or t
  misc_feature (1052)..(1052): n is a, c, g, or t
  misc_feature (1059)..(1059): n is a, c, g, or t
  misc_feature (1076)..(1076): n is a, c, g, or t
  misc_feature (1083)..(1083): n is a, c, g, or t
  misc_feature (1085)..(1085): n is a, c, g, or t
  misc_feature (1095)..(1095): n is a, c, g, or t
  misc_feature (1102)..(1102): n is a, c, g, or t
  misc_feature (1114)..(1114): n is a, c, g, or t
  misc_feature (1118)..(1118): n is a, c, g, or t
  misc_feature (1122)..(1122): n is a, c, g, or t
  misc_feature (1124)..(1124): n is a, c, g, or t
  misc_feature (1144)..(1144): n is a, c, g, or t
  misc_feature (1148)..(1148): n is a, c, g, or t
  misc_feature (1150)..(1150): n is a, c, g, or t
  misc_feature (1156)..(1156): n is a, c, g, or t
  misc_feature (1175)..(1175): n is a, c, g, or t
  misc_feature (1186)..(1188): n is a, c, g, or t
  misc_feature (1190)..(1191): n is a, c, g, or t
  misc_feature (1209)..(1210): n is a, c, g, or t
  misc_feature (1238)..(1239): n is a, c, g, or t
  misc_feature (1253)..(1254): n is a, c, g, or t
  misc_feature (1258)..(1258): n is a, c, g, or t
  misc_feature (1264)..(1264): n is a, c, g, or t
  misc_feature (1299)..(1299): n is a, c, g, or t
  misc_feature (1305)..(1305): n is a, c, g, or t
  misc_feature (1312)..(1313): n is a, c, g, or t
  misc_feature (1319)..(1319): n is a, c, g, or t
  misc_feature (1321)..(1321): n is a, c, g, or t
tagagaaattactatgagaggatcgcatcaccatcaccatcacggatcctatttaggtgacactatagaatcgtcgacccacgcgtccgacaatcctagcagcatgatgggaccccacagtcagccttttatgtcaccgcgatacgcaggcggccccaggcccccgatcagaatgggaaaccagcctccgggaggagttcctgggacacagccattgctgcccaattctatggatcccacacgacaacaaggccaccccaacatgggaggatcaatgcagagaatgaaccctccccgaggcatggggcccatgggtcccggcccacagaattacggcagcggcatgagaccaccacccaactccctcggccccgccatgcccgggattaacatgggcccgggagctggcagaccctggcccaatcctaacagtgctaactcaattccatactcctcctcatcacctggtacctatgtgggaccccctggtggtggcggtcctccaggaacacccattatgcccagtcccgcagattcaacaaattccagtgacaacatctacacaatgattaatccagtgccgcctggaggcagccggtccaacttcccgatgggtcccggctcggacggtccgatgggcggcatgggtggcatggagccacaccacatgaatggatcattagggtcaggcgacatagacggacttccaaaaaattctcctaacaacataagtggcattagcaatcctccaggcacccctcgagatgacggcgagctaggagggaacttcctccactcctttcagaacgacaattattctccaagcatgacgatgagtgtgtgatccccccnttctccganacgctganagagcaggcattgcaggcgggaaaatgccanaaattatgcaagantgaggtgtcattatccaggagctggngggggagggnatctcctggttcccctnaacccccttccaacccnattcaagnccccctaacttttccaattttnantttcttgcaaaaaaaaggccaaantttttntttccnttaaaanaaaaaggaaaaactttnaaaaatntntttcaggtcngtgaacnaaaaaaattccncccnttgncnttttcccaaagaaacttttngganangaaaanttttttttgttttttgttnggggtttaccnnngnnggattttttttttttttnngggggtttttgggggaaaatttttttanngaaattttaaaaanncccncccaantaacttttttttttttttaaaaaaaaaagggggcncccccnaaggggnnataaantnttt

SEQ ID NO: 369 - DNA, 976 bp, Homo Sapiens
  misc_feature (421)..(421): n is a, c, g, or t
  misc_feature (531)..(531): n is a, c, g, or t
  misc_feature (544)..(544): n is a, c, g, or t
  misc_feature (663)..(663): n is a, c, g, or t
  misc_feature (669)..(669): n is a, c, g, or t
  misc_feature (680)..(680): n is a, c, g, or t
  misc_feature (731)..(731): n is a, c, g, or t
  misc_feature (742)..(742): n is a, c, g, or t
  misc_feature (745)..(745): n is a, c, g, or t
  misc_feature (749)..(749): n is a, c, g, or t
  misc_feature (753)..(753): n is a, c, g, or t
  misc_feature (756)..(756): n is a, c, g, or t
  misc_feature (788)..(788): n is a, c, g, or t
  misc_feature (790)..(791): n is a, c, g, or t
  misc_feature (797)..(797): n is a, c, g, or t
  misc_feature (808)..(808): n is a, c, g, or t
  misc_feature (814)..(814): n is a, c, g, or t
  misc_feature (820)..(820): n is a, c, g, or t
  misc_feature (831)..(831): n is a, c, g, or t
  misc_feature (839)..(839): n is a, c, g, or t
  misc_feature (842)..(842): n is a, c, g, or t
  misc_feature (849)..(849): n is a, c, g, or t
  misc_feature (851)..(851): n is a, c, g, or t
  misc_feature (866)..(866): n is a, c, g, or t
  misc_feature (871)..(871): n is a, c, g, or t
  misc_feature (873)..(873): n is a, c, g, or t
  misc_feature (876)..(876): n is a, c, g, or t
  misc_feature (889)..(889): n is a, c, g, or t
  misc_feature (897)..(897): n is a, c, g, or t
  misc_feature (903)..(903): n is a, c, g, or t
  misc_feature (905)..(905): n is a, c, g, or t
  misc_feature (916)..(916): n is a, c, g, or t
  misc_feature (919)..(919): n is a, c, g, or t
  misc_feature (922)..(922): n is a, c, g, or t
  misc_feature (927)..(927): n is a, c, g, or t
  misc_feature (933)..(933): n is a, c, g, or t
  misc_feature (936)..(936): n is a, c, g, or t
  misc_feature (938)..(938): n is a, c, g, or t
  misc_feature (943)..(943): n is a, c, g, or t
  misc_feature (948)..(948): n is a, c, g, or t
  misc_feature (951)..(952): n is a, c, g, or t
tatagagaattactatgagaggatcgcatcaccatcaccatcacggatcctatttaggtgacactatagaatcgtcgacccacgcgtccgggcgtcacgtttacaaggccatgacgctgatggagtacctcatcaagaccggctcggagcgcgtgtcgcagcagtgcaaggagaacatgtacgccgtgcagacgctgaaggacttccagtacgtggaccgcgacggcaaggaccagggcgtgaacgtgcgtgagaaagctaagcagctggtggccctgctgcgcgacgaggaccggctgcgggaagagcgggcgcacgcgctcaagaccaaggaaaagctggcacagaccgccacggcctcatcagcagctgtgggctcaggcccccctcccgaggcggagcaggcgtggccgcagagcancggggaggaggagctgcagctccagctggccctggccatgagcaaggaggaggccgaccaggaggagcggatccgtcgcggggatgacctgcggctgcagatggcaatcnaggagagcaaganggagactgggggcaaggaggagtcgtccctcatggaccttgctgacgtcttcacggccccagctcctgccccgaccacagacccctgggggggcccagcacccatggctgctgccgtcnccaacngctgcccccanctcggacccctggggcggccccccctgtcccttccagctgctgatttcctnggggaggatcnagncccncacnccnggccttcttggggaacccctggagggcctggntnncccctncaagaaccctnaatttnaacccntttggggttgngaaccccnatnccccttncnactgggggaaggggncccantnccntaattcattgganaaattttnccaatngntggggttcccngtnaantgggncccatnaancntttcnattcnctnnaaaaagagaccccgggcctttttt

SEQ ID NO: 370 - DNA, 935 bp, Homo Sapiens
catcaccatcaccatcacggatcctatttaggtgacactatagaatcgtcgacccacgcgtccgcgcggatggccgcagcggcgatggcggcagcggcaggtggaggggctggcgcggcccgctccctctcgcgcttccgaggctgcctggctggcgcgctgctcggggactgcgtgggctccttctacgaggcccacgacaccgtcgacctgacgtcagtcctgcgtcatgtccagagtctggagccggaccccggcacgcccgggagtgagcggacagaagccttgtactacacagatgacacagccatggccagggccctggtgcagtccctgctagccaaggaggcctttgacgaggtggacatggctcacagatttgctcaggagtacaagaaagaccctgacaggggctatggtgctggagtagtcactgtcttcaagaagctcctgaaccccaaatgtcgcgatgtctttgagcctgcccgggcccagtttaacgggaaaggctcctatggcaatggaggtgccatgcgggtggctggcatctccctggcctatagcagtgtccaggatgtgcagaagtttgcccggctctcggcccagctgacacacgcctcctccctgggttacaatggcgccatcctgcaggccctggctgtgcacctggccttgcagggcgagtcttccagcgagcactttctcaagcaactcctgggccacatggaggatctggagggtgatgcccagtccgtttttggatgccagggagttgggcatggaggagcgtccatactccagccgcctgaagaagattggagagcttctagaccaggcatcggtgaccagggaggaagtggtgtctgagctaggaatgccattgctgcctttgagtcggtacccaccgccatctaactgtttcctacgctgcatgg

SEQ ID NO: 371 - DNA, 1179 bp, Homo Sapiens
  misc_feature (847)..(847): n is a, c, g, or t
  misc_feature (863)..(863): n is a, c, g, or t
  misc_feature (895)..(895): n is a, c, g, or t
  misc_feature (900)..(900): n is a, c, g, or t
  misc_feature (920)..(920): n is a, c, g, or t
  misc_feature (936)..(936): n is a, c, g, or t
  misc_feature (961)..(961): n is a, c, g, or t
  misc_feature (966)..(966): n is a, c, g, or t
  misc_feature (969)..(969): n is a, c, g, or t
  misc_feature (999)..(999): n is a, c, g, or t
  misc_feature (1014)..(1014): n is a, c, g, or t
  misc_feature (1023)..(1023): n is a, c, g, or t
  misc_feature (1034)..(1034): n is a, c, g, or t
  misc_feature (1044)..(1045): n is a, c, g, or t
  misc_feature (1065)..(1065): n is a, c, g, or t
  misc_feature (1075)..(1075): n is a, c, g, or t
  misc_feature (1079)..(1079): n is a, c, g, or t
  misc_feature (1087)..(1087): n is a, c, g, or t
  misc_feature (1102)..(1102): n is a, c, g, or t
  misc_feature (1121)..(1121): n is a, c, g, or t
  misc_feature (1124)..(1124): n is a, c, g, or t
  misc_feature (1128)..(1128): n is a, c, g, or t
  misc_feature (1141)..(1142): n is a, c, g, or t
  misc_feature (1144)..(1144): n is a, c, g, or t
  misc_feature (1148)..(1148): n is a, c, g, or t
  misc_feature (1157)..(1158): n is a, c, g, or t
  misc_feature (1166)..(1166): n is a, c, g, or t
  misc_feature (1169)..(1169): n is a, c, g, or t
  misc_feature (1172)..(1172): n is a, c, g, or t
  misc_feature (1176)..(1176): n is a, c, g, or t
tagagagattaactatgagaggatcgcatcaccatcaccatcacggatcctatttaggtgacactatagaatcgtcgacccacgcgtccggtcaggtagactgtgaggagaaagtgaagggttttaagtggggaaatgacatgatttggtttttattttaggattacaggcgtgagccgccgcgcctggctgcttgcagcctttatattatctatggctgctattatataccctctccagttctgctgcagtggcataatagagtaattgtgccgagaatgaatttgtctctaggcccaaaagcctaaaatatctacattctggccccttaagagtttgctgaccttgctctagcttgctaccttccactttctaccttcttattcctggggttctcacgccccagcccagacccttccaaccctcacaggtgcctgtccttgatccctctcccttcccttcagcatctacacgggcgacagcttcgtcaccccttgatggggcagcctcttcccctcatcacagactatgctgttcagccacatgtgggcacgggggcagtgaaggtgactccagctcacagtcctgccgatgctgagatgggggcccgacatggcttgagccccttgaatgtcattgcggaggatgggaccatgacctccctctgcggggactggttgcagggtcttcaccggtttgtggcccgggaaaagataatgtctgtgctgagtgaacggggcctattccggggcctccagaaccaccccatggtactgcccatctgcagccgttctggggatgtgatagaatacctgctgaagaaccagtggttttgtccgctgccagnaaaatgggggcccganctgccaaggctgtggagtcgggggccctgganctcantccctccttccaccaaaaanactgggcagcactggnttttcccatattgggggactggtgntgtcnccnggcagctggggggggggccatcaaaatccnagcctacctggttgnaaaagaacnatgccccaagnaaaaaaaaanngttggggggttggggcggtnaaaagctgangccnaaaaaggnaccacggaaactganagggaggccaggggcaaanctnaccntggaaaaggaatnngnaggnccaaaaaanngggttttnttnggnccgnttc

SEQ ID NO: 372 - DNA, 998 bp, Homo Sapiens
  misc_feature (879)..(879): n is a, c, g, or t
  misc_feature (884)..(884): n is a, c, g, or t
  misc_feature (891)..(891): n is a, c, g, or t
  misc_feature (912)..(912): n is a, c, g, or t
  misc_feature (914)..(914): n is a, c, g, or t
  misc_feature (929)..(929): n is a, c, g, or t
  misc_feature (946)..(946): n is a, c, g, or t
  misc_feature (954)..(954): n is a, c, g, or t
  misc_feature (965)..(967): n is a, c, g, or t
  misc_feature (974)..(974): n is a, c, g, or t
  misc_feature (979)..(979): n is a, c, g, or t
  misc_feature (982)..(989): n is a, c, g, or t
  misc_feature (991)..(992): n is a, c, g, or t
  misc_feature (994)..(998): n is a, c, g, or t
tagagaaattactatgagaggatcgcatcaccatcaccatcacggatcctatttaggtgacactatagaatcgtcgacccacgcgtccgcccacgcgtccgccatgggcctggaggcagccacggccgtgggcctcagtgacttctgctccaatccagacccttatgttctgaacctgacccaggaggagacagggctcagctcagacatcctgagctattatctcctctgcaaccgggccgtctccaaccccttccaacagaggctgactctgtcccagcgagctctggccaacatccactcccagctgctgggcctggagcgagaagctgtgcctcagttcccttcagcgcagaagcctctgctgtccttggaggagactctgaatgtgacagaaggaaatttccaccagttggtggcactgctacactgccgcagcctgcacaaggactatggtgcagccctgcggggcctgtgcgaagacgccctggaaggcctgctcttcctgctactcttctccctgctgtctgcaggagcgctggccactgccctctgcagcctgccccgagcctgggccctcttcccacccagtgacgactacgatgacacagacgatgacgaccctttcaaccctcaggaatccaagcgctttgtgcagtggcagtcgtctatctgagcccctcctcccggctggactggagcctggctcccctcttcgttccttccctggctgccggaggagaccccactaacccagcctgcctgggctctgaccactaacactcttggccatggacagcctgcacaggaccgcctccctgctcttggccactgtgctcccatttctgtccttggccttgggagtagctgaaggggcanactanggagtanggctggcaggggagggggcananagcctcgcctcgcanccttcatcctggctgcngtccatcntggaggataannnggggggnggggnaannnnnnnncnngnnnnn

SEQ ID NO: 373 - DNA, 969 bp, Homo Sapiens
  misc_feature (745)..(746): n is a, c, g, or t
  misc_feature (759)..(759): n is a, c, g, or t
  misc_feature (768)..(768): n is a, c, g, or t
  misc_feature (782)..(782): n is a, c, g, or t
  misc_feature (786)..(788): n is a, c, g, or t
  misc_feature (807)..(807): n is a, c, g, or t
  misc_feature (813)..(813): n is a, c, g, or t
  misc_feature (815)..(815): n is a, c, g, or t
  misc_feature (822)..(822): n is a, c, g, or t
  misc_feature (826)..(826): n is a, c, g, or t
  misc_feature (833)..(833): n is a, c, g, or t
  misc_feature (836)..(836): n is a, c, g, or t
  misc_feature (843)..(843): n is a, c, g, or t
  misc_feature (846)..(846): n is a, c, g, or t
  misc_feature (871)..(871): n is a, c, g, or t
  misc_feature (875)..(875): n is a, c, g, or t
  misc_feature (879)..(879): n is a, c, g, or t
  misc_feature (885)..(886): n is a, c, g, or t
  misc_feature (892)..(892): n is a, c, g, or t
  misc_feature (911)..(914): n is a, c, g, or t
  misc_feature (916)..(916): n is a, c, g, or t
  misc_feature (931)..(931): n is a, c, g, or t
  misc_feature (934)..(934): n is a, c, g, or t
  misc_feature (951)..(951): n is a, c, g, or t
  misc_feature (956)..(956): n is a, c, g, or t
  misc_feature (962)..(962): n is a, c, g, or t
  misc_feature (965)..(965): n is a, c, g, or t
aatagagagattactatgagaggatcgcatcaccatcaccatcacgggatcctatttaggtgacactatagaatcgtcgacccacgcgtccgactcagcatgcccaactcccaaccctctgtctcgacacagtccagcccctttctccaaatcttctacgttctatagaaacagcccagcaagggaattgcatcttcctataagggatggtaatactttggaaatgcatggtgacacctgccaacctggcattttcaactatgccacaaggctgggaaggagaagcaagagtcctcaggccatggcatcacatggttctagaccagggagtcgcctaaagcagccgattgggcagattccactggaatcttctcctccagtcggactttctattgaagaagtggagaggctcaacacacctcgccctagaaacccaagtatctgcagtgcagaccatgggaggtcttcttcagaggaggactgcagaaggccactgtctagaacaaggaatccagcggatggcattccagctccagaatcctcttctgatagtgactcccatgaatctttcacttgctcagaaatggaatatgacagggagaagccaatggtatatacttccaggatgcccaaaattatctcaagtcaaatgaatctgatgcagatgatgaaagataattatggagccagactgaagccttcgaaggtaccacgggtcgcagggcccgagggaaggacctgtggnncaccccaaggcancagcaccanggcaactgcttganaacnnnactggcccatgaaagctangggcancnaagcaanggancttttcnacntgggganaanctttttgaactgggggcccctggcntttngccnattaanntaaaanggtttttaaaagaatttgnnnncnccttcccagaaaaanccngtcagccaaatggaaanaaggngaaaanctngggg

SEQ ID NO: 374 - DNA, 979 bp, Homo Sapiens
  misc_feature (2)..(2): n is a, c, g, or t
  misc_feature (631)..(631): n is a, c, g, or t
  misc_feature (710)..(710): n is a, c, g, or t
  misc_feature (738)..(738): n is a, c, g, or t
  misc_feature (745)..(745): n is a, c, g, or t
  misc_feature (789)..(789): n is a, c, g, or t
  misc_feature (800)..(800): n is a, c, g, or t
  misc_feature (807)..(807): n is a, c, g, or t
  misc_feature (814)..(814): n is a, c, g, or t
  misc_feature (838)..(838): n is a, c, g, or t
  misc_feature (867)..(867): n is a, c, g, or t
  misc_feature (884)..(884): n is a, c, g, or t
  misc_feature (886)..(886): n is a, c, g, or t
  misc_feature (890)..(891): n is a, c, g, or t
  misc_feature (899)..(899): n is a, c, g, or t
  misc_feature (903)..(904): n is a, c, g, or t
  misc_feature (907)..(908): n is a, c, g, or t
  misc_feature (911)..(911): n is a, c, g, or t
  misc_feature (915)..(915): n is a, c, g, or t
  misc_feature (918)..(918): n is a, c, g, or t
  misc_feature (931)..(931): n is a, c, g, or t
  misc_feature (942)..(942): n is a, c, g, or t
  misc_feature (944)..(944): n is a, c, g, or t
  misc_feature (948)..(948): n is a, c, g, or t
  misc_feature (953)..(953): n is a, c, g, or t
  misc_feature (958)..(958): n is a, c, g, or t
  misc_feature (975)..(975): n is a, c, g, or t
antagagaaattactatgagaggatcgcatcaccatcaccatcacgggatcctatttaggtgacactatagaatcgtcgacccacgcgtccgctcaaggtcttggagatctcccactggccctcaacctgacgtccctgtccatcacacactgcaatctgaccgctgtgccctacctggccgtccgccacctagtctatctccgcttcctcaacctctcctacaaccccatcagcaccattgagggctccatgttgcatgagctgctccggctgcaggagatccagctggtgggcgggcagctggccgtggtggagccctatgccttccgcggcctcaactacctgcgcgtgctcaatgtctctggcaaccagctgaccacactggaggaatcagtcttccactcggtgggcaacctggagacactcatcctggactctaacccgctggcctgcgactgtcggctcctgtgggtgttccggcgccgctggcggctcaacttcaaccggcagcagcccacgtgcgccacgcccgagtttgtccagggcaaggagttcaaggacttccctgatgtgctactgcccaactacttcacctgccgccgcgcccgcatccgggaccgcaaggcccancaggtgtttgtggacgagggccacacggtgcagtttgtgtgccgggccgatggcgacccgacgcccgccatcctctggntctcaccccgaaagcacctggttctcanccaagancaatgggcggctcacaagtcttccctgaatggcaacgctggaangtgcgctacgnccaggtnaaagganaaacgggcacgtaccttgtgcatncgcggacaaacagcggggcggaaaagganttccattgccccgcccnanatgnntttgtgcncaanntanntcncccnaantggcccccatcanccaaaaaaaancnttcnttttnatttncaacaatccggccaaangaaa

SEQ ID NO: 375 - DNA, 1237 bp, Homo Sapiens
  misc_feature (829)..(829): n is a, c, g, or t
  misc_feature (832)..(832): n is a, c, g, or t
  misc_feature (867)..(867): n is a, c, g, or t
  misc_feature (887)..(887): n is a, c, g, or t
  misc_feature (897)..(897): n is a, c, g, or t
  misc_feature (911)..(911): n is a, c, g, or t
  misc_feature (933)..(933): n is a, c, g, or t
  misc_feature (939)..(939): n is a, c, g, or t
  misc_feature (948)..(948): n is a, c, g, or t
  misc_feature (951)..(951): n is a, c, g, or t
  misc_feature (968)..(968): n is a, c, g, or t
  misc_feature (987)..(987): n is a, c, g, or t
  misc_feature (992)..(992): n is a, c, g, or t
  misc_feature (998)..(998): n is a, c, g, or t
  misc_feature (1008)..(1008): n is a, c, g, or t
  misc_feature (1024)..(1024): n is a, c, g, or t
  misc_feature (1052)..(1052): n is a, c, g, or t
  misc_feature (1059)..(1059): n is a, c, g, or t
  misc_feature (1069)..(1069): n is a, c, g, or t
  misc_feature (1072)..(1072): n is a, c, g, or t
  misc_feature (1074)..(1074): n is a, c, g, or t
  misc_feature (1092)..(1092): n is a, c, g, or t
  misc_feature (1096)..(1096): n is a, c, g, or t
  misc_feature (1098)..(1099): n is a, c, g, or t
  misc_feature (1102)..(1102): n is a, c, g, or t
  misc_feature (1107)..(1107): n is a, c, g, or t
  misc_feature (1123)..(1123): n is a, c, g, or t
  misc_feature (1129)..(1129): n is a, c, g, or t
  misc_feature (1138)..(1139): n is a, c, g, or t
  misc_feature (1143)..(1143): n is a, c, g, or t
  misc_feature (1148)..(1148): n is a, c, g, or t
  misc_feature (1150)..(1151): n is a, c, g, or t
  misc_feature (1165)..(1165): n is a, c, g, or t
  misc_feature (1173)..(1173): n is a, c, g, or t
  misc_feature (1181)..(1181): n is a, c, g, or t
  misc_feature (1188)..(1188): n is a, c, g, or t
  misc_feature (1199)..(1199): n is a, c, g, or t
  misc_feature (1210)..(1210): n is a, c, g, or t
  misc_feature (1223)..(1223): n is a, c, g, or t
  misc_feature (1227)..(1227): n is a, c, g, or t
  misc_feature (1235)..(1236): n is a, c, g, or t
aatagagaaattactatgagaggatcgcatcaccatcaccatcacggatcctatttaggtgacactatagaatcgtcgacccacgcgtccgcccacgcgtccgccagcaccttcaagatgctgaccggcgacgagagcacgacggggggcgaggccttcgtcaatggacacagcgtgctgaaggagctgctccaggtgcagcagagcctcggctactgcccgcagtgtgacgcgctgttcgacgagctcacggcccgggagcacctgcagctgtacacgcggctgcgtgggatctcctggaaggacgaggcccgggtggtgaagtgggctctggagaagctggagctgaccaagtacgcagacaagccggctggcacctacagcggcggcaacaagcggaagctctccacggccatcgccctcattgggtacccagccttcatcttcctggacgagcccaccacaggcatggaccccaaggcccggcgcttcctctggaacctcatccttgacctcatcaagacagggcgttcagtggtgctgacatcacacagcatggaggagtgcgaggcgctgtgcacgcggctggccatcatggtgaacggtcgcctgcggtgcctgggcagcatccagcacctgaagaaccggtttggagatggctacatgatcacggtgcggaccaagagcagccagagtgtgaaggacgtggtgcggttcttcaaccgcaacttcccggaagccatgctcaaggagcggcaccacacaaaggtgcagtaccagctcaagtcggagcacatctcgctggcccaggtgttcagcaagatggaancangtgtctggcgtgctgggcatcgaggactactcggntcagccaaaccacactgganaatgtgttcntgaactttgccaanaaccaaaatgacaaccttgaancaccangaaacgganccnccatcccgcaactgcantcccctttcggctgcttgnttcanccttgntccgggcccnggttttgcccccacgnaaacttccgggccctttgttggcaaaanaaccccnaagaacctgnaananggaagaaaaagggccttnctcnannttncaagnaaaaacggggccccanttttcntttaaaaannaaanccttntnnttaaaacccaaaantgggcccngggagaanccctccncttaacccccnaaattgggccngggaatccaaaangggnaaaaaaannc

SEQ ID NO: 376 - DNA, 921 bp, Homo Sapiens
tatgagaggtcgcatcaccatcaccatcacggatcctatttaggtgacactatagaatcgtcgacccacgcgtccgagaagataagagtcactcaagggaaaggattaatgccagatggtaccagcagatttacttgcaaaggaaagacaattttgcattacatgggaaccagcacattttctgaatacacagttgtggctgatatctctgttgctaaaatagatcctttagcacctttggataaagtctgccttctaggttgtggcatttcaaccggttatggtgctgctgtgaacactgccaagttggagcctggctctgtttgtgccgtctttggtctgggaggagtcggattggcagttatcatgggctgtaaagtggctggtgcttcccggatcattggtgtggacatcaataaagataaatttgcaagggccaaagagtttggagccactgaatgtattaaccctcaggattttagtaaacccatccaggaagtgctcattgagatgaccgatggaggagtggactattcctttgaatgtattggtaatgtgaaggtcatgagagcagcacttgaggcatgtcacaagggctggggcgtcagcgtcgtggttggagtagctgcttcaggtgaagaaattgccactcgtccattccagctggtaacaggtcgcacatggaaaggcactgcctttggaggatggaagagtgtagaaagtgtcccaaagttggtgtctgaatatatgtccaaaaagataaaagttgatgaatttgtgactcacaatctgtcttttgatgaaatcaacaaagcctttgaactgatgcattctggaaagagcattcgaactgttgtaaagatttaattcaaaagagaaaaataatgtccatcctgtcgtgatgtgataggagcagcttaa

SEQ ID NO: 377 - DNA, 1282 bp, Homo Sapiens
  misc_feature (914)..(914): n is a, c, g, or t
  misc_feature (928)..(928): n is a, c, g, or t
  misc_feature (960)..(960): n is a, c, g, or t
  misc_feature (965)..(965): n is a, c, g, or t
  misc_feature (970)..(970): n is a, c, g, or t
  misc_feature (982)..(982): n is a, c, g, or t
  misc_feature (986)..(986): n is a, c, g, or t
  misc_feature (996)..(996): n is a, c, g, or t
  misc_feature (1005)..(1005): n is a, c, g, or t
  misc_feature (1015)..(1016): n is a, c, g, or t
  misc_feature (1045)..(1045): n is a, c, g, or t
  misc_feature (1059)..(1059): n is a, c, g, or t
  misc_feature (1065)..(1065): n is a, c, g, or t
  misc_feature (1072)..(1072): n is a, c, g, or t
  misc_feature (1075)..(1075): n is a, c, g, or t
  misc_feature (1082)..(1082): n is a, c, g, or t
  misc_feature (1085)..(1085): n is a, c, g, or t
  misc_feature (1092)..(1092): n is a, c, g, or t
  misc_feature (1112)..(1112): n is a, c, g, or t
  misc_feature (1114)..(1115): n is a, c, g, or t
  misc_feature (1124)..(1125): n is a, c, g, or t
  misc_feature (1134)..(1134): n is a, c, g, or t
  misc_feature (1137)..(1137): n is a, c, g, or t
  misc_feature (1139)..(1140): n is a, c, g, or t
  misc_feature (1153)..(1153): n is a, c, g, or t
  misc_feature (1161)..(1161): n is a, c, g, or t
  misc_feature (1171)..(1171): n is a, c, g, or t
  misc_feature (1175)..(1175): n is a, c, g, or t
  misc_feature (1177)..(1177): n is a, c, g, or t
  misc_feature (1191)..(1191): n is a, c, g, or t
  misc_feature (1198)..(1198): n is a, c, g, or t
  misc_feature (1204)..(1204): n is a, c, g, or t
  misc_feature (1208)..(1208): n is a, c, g, or t
  misc_feature (1210)..(1210): n is a, c, g, or t
  misc_feature (1221)..(1221): n is a, c, g, or t
  misc_feature (1223)..(1223): n is a, c, g, or t
  misc_feature (1230)..(1230): n is a, c, g, or t
  misc_feature (1246)..(1249): n is a, c, g, or t
  misc_feature (1260)..(1260): n is a, c, g, or t
  misc_feature (1266)..(1266): n is a, c, g, or t
  misc_feature (1269)..(1269): n is a, c, g, or t
  misc_feature (1282)..(1282): n is a, c, g, or t
attagagaaattactatgagaggatcgcatcaccatcaccatcacggatcctatttaggtgacactatagaatcgtcgacccacgcgtccgatgagatcgaccttcagaagatgcccttggggaagctgagcaaaaggcagatccaggccgcatactccatcctcagtgaggtccagcaggcggtgtctcagggcagcagcgactctcagatcctggatctctcaaatcgcttttacaccctgatcccccacgactttgggatgaagaagcctccgctcctgaacaatgcagacagtgtgcaggccaaggtggaaatgcttgacaacctgctggacatcgaggtggcctacagtctgctcaggggagggtctgatgatagcagcaaggatcccatcgatgtcaactatgagaagctcaaaactgacattaaggtggttgacagagattctgaagaagccgagatcatcaggaagtatgttaagaacactcatgcaaccacacacaatgcgtatgacttggaagtcatcgatatctttaagatagagcgtgaaggcgaatgccagcgttacaagccctttaagcagcttcataaccgaagattgctgtggcacgggtccaggaccaccaactttgctgggatcctgtcccagggtcttcggatagccccgcctgaagcgcccgtgacaggctacatgtttggtaaagggatctatttcgctgacatggtctccaagagtgccaactactgccatacgtctcagggagacccaataggcttaatcctgttgggagaagttgcccttggaaacatgtatgaactgaagcacgcttcacatatcagcaagttacccaagggcaagcacagtgtcaaaggtttgggcaaaactacccctgatccttcagctaacattantctggatggtgtanacgttcctcttgggaccgggatttcatctggngtgantgacncctctctactanatancgagtacatngtctatganattgctcagnnaatctgaagtatctgctgaaactgaaatncatttttaaaaccnccctgnggtaatnggnaaagtanccnaatcccncccgggggctctggtaaaantnncccgaaagnnttttggacnaantnncctgggccctaantttctganggggaaaacntgtncnaaccccccccaaanggatttncaaaancggntnaaggttttccnanttcccancccctttttttgttgnnnnggggggggggntttttnggnttttttttttttn

SEQ ID NO: 378 - DNA, 1081 bp, Homo Sapiens
  misc_feature (880)..(880): n is a, c, g, or t
  misc_feature (891)..(891): n is a, c, g, or t
  misc_feature (928)..(928): n is a, c, g, or t
  misc_feature (930)..(930): n is a, c, g, or t
  misc_feature (940)..(940): n is a, c, g, or t
  misc_feature (984)..(984): n is a, c, g, or t
  misc_feature (988)..(988): n is a, c, g, or t
  misc_feature (994)..(994): n is a, c, g, or t
  misc_feature (999)..(999): n is a, c, g, or t
  misc_feature (1003)..(1003): n is a, c, g, or t
  misc_feature (1006)..(1006): n is a, c, g, or t
  misc_feature (1013)..(1013): n is a, c, g, or t
  misc_feature (1017)..(1017): n is a, c, g, or t
  misc_feature (1036)..(1036): n is a, c, g, or t
  misc_feature (1040)..(1042): n is a, c, g, or t
  misc_feature (1048)..(1048): n is a, c, g, or t
  misc_feature (1053)..(1053): n is a, c, g, or t
  misc_feature (1057)..(1058): n is a, c, g, or t
  misc_feature (1061)..(1061): n is a, c, g, or t
  misc_feature (1063)..(1064): n is a, c, g, or t
  misc_feature (1074)..(1074): n is a, c, g, or t
taattagagagaattactatgagaggatcgcatcaccatcaccatcacggatcctatttaggtgacactatagaatcgtcgacccacgcgtccgagggtgcccccgagcgcatcctggaccgctgctccaccatcctgctacagggcaaggagcagcctctggacgaggaaatgaaggaggccttccagaatgcctaccttgagctcggtggcctgggcgagcgcgtgcttggtttctgccattattacctgcccgaggagcagttccccaagggctttgccttcgactgtgatgacgtgaacttcaccacggacaacctctgctttgtgggcctcatgtccatgatcgacccaccccgggcagccgtccctgacgcggtgggcaagtgtcgcagcgcaggcatcaaggtcatcatggtcaccggcgatcaccccatcacggccaaggccattgccaagggtgtgggcatcatctctgagggcaacgagactgtggaggacatcgccgcccggctcaacattcccgtcagccaggttaacccccgggatgccaaggcctgcgtgatccacggcaccgacctcaaggacttcacctccgagcaaatcgacgagatcctgcagaatcacaccgagatcgtcttcgcccgcacatccccccagcagaagctcatcattgtggagggctgtcagagacagggtgcaattgtggctgtgaccggggatggtgtgaacgactcccccgctctgaagaaggccgacattggggtggccatgggcatcgctggctctgacgtctccaagcaggcagctgacatgatcctgctggacgacaactttgcctccatcgtcacaggggtggaggagggccgcctgatcttcnacaacctaaanaagtccattgcctacaccctgaccagcaatatcccgnanatcacgcccnttcctgctgttcatcatggccaaaatcccgctgccctgggcacnatcnccatcntctgnatcnatntgggcantganatggtccctgccatctcantggnnnacaagntgccnaaannaantnntgaaaaaaancccagaa

SEQ ID NO: 379 - DNA, 1296 bp, Homo Sapiens
  misc_feature (873)..(873): n is a, c, g, or t
  misc_feature (960)..(960): n is a, c, g, or t
  misc_feature (991)..(991): n is a, c, g, or t
  misc_feature (998)..(998): n is a, c, g, or t
  misc_feature (1013)..(1013): n is a, c, g, or t
  misc_feature (1019)..(1019): n is a, c, g, or t
  misc_feature (1034)..(1034): n is a, c, g, or t
  misc_feature (1043)..(1043): n is a, c, g, or t
  misc_feature (1048)..(1048): n is a, c, g, or t
  misc_feature (1060)..(1060): n is a, c, g, or t
  misc_feature (1066)..(1066): n is a, c, g, or t
  misc_feature (1089)..(1089): n is a, c, g, or t
  misc_feature (1092)..(1093): n is a, c, g, or t
  misc_feature (1098)..(1098): n is a, c, g, or t
  misc_feature (1111)..(1111): n is a, c, g, or t
  misc_feature (1136)..(1136): n is a, c, g, or t
  misc_feature (1147)..(1147): n is a, c, g, or t
  misc_feature (1151)..(1151): n is a, c, g, or t
  misc_feature (1153)..(1153): n is a, c, g, or t
  misc_feature (1169)..(1169): n is a, c, g, or t
  misc_feature (1172)..(1172): n is a, c, g, or t
  misc_feature (1174)..(1174): n is a, c, g, or t
  misc_feature (1176)..(1176): n is a, c, g, or t
  misc_feature (1178)..(1178): n is a, c, g, or t
  misc_feature (1204)..(1204): n is a, c, g, or t
  misc_feature (1209)..(1209): n is a, c, g, or t
  misc_feature (1213)..(1213): n is a, c, g, or t
  misc_feature (1215)..(1215): n is a, c, g, or t
  misc_feature (1226)..(1226): n is a, c, g, or t
  misc_feature (1238)..(1238): n is a, c, g, or t
  misc_feature (1243)..(1243): n is a, c, g, or t
  misc_feature (1252)..(1252): n is a, c, g, or t
  misc_feature (1263)..(1265): n is a, c, g, or t
  misc_feature (1267)..(1267): n is a, c, g, or t
  misc_feature (1269)..(1269): n is a, c, g, or t
  misc_feature (1271)..(1276): n is a, c, g, or t
  misc_feature (1285)..(1285): n is a, c, g, or t
  misc_feature (1293)..(1294): n is a, c, g, or t
tagagaaattactatgagaggatcgcatcaccatcaccatcacggatcctatttaggtgacactatagaatcgtcgacccacgcgtccgcccagaccctgaggatactgtgctatgaaaagtgttacaacaagacgaagatccccaaggaggacggcgagagcacggacagactcatggggaagggccaggtccagctggacccgcaggccctgcaggacagagactggcagcgcaccgtcatcgccatgaatgggatcgaagtaaagctctcggtcaagttcaacagcagggagttcagcttgaagaggatgccgtcccgaaaacagacaggggtcttcggagtcaagattgctgtggtcaccaagagagagaggtccaaggtgccctacatcgtgcgccagtgcgtggaggagatcgagcgccgaggcatggaggaggtgggcatctaccgcgtgtccggtgtggccacggacatccaggcactgaaggcagccttcgacgtcaataacaaggacgtgtcggtgatgatgagcgagatggacgtgaacgccatcgcaggcacgctgaagctgtacttccgtgagctgcccgagcccctcttcactgacgagttctaccccaacttcgcagagggcatcgctctttcagacccggttgcaaaggagagctgcatgctcaacctgctgctgtccctgccggaggccaacctgctcaccttccttttccttctggaccacctgaaaaggtccaggtgctgctgtacttcctgcagctggaggccatccctgccccggacagcaagagacagagcatcctgttctccaccgaagtctaaaggtcccagtccatctcctggaggcggacagatggncctggaaacctctggctaatcggggccatccgtaaagcgggaaccttcctgaggtgtctttgggccccccccaagtgttgggccatntgccaagaaacagcgacccaaacccaaaganaggtggncctggaaaaatcccncccagntttgggaacccccangctgggccncaaantggggttttttntttggncccctgagggccccccaagccanttnnttcgnaatccagccctgncctgggaaaaaaggtgaagggatgnttttttaaacntacntnaaatctaaaaaatttnctngnancntttcaaaatccccctcttgggaaaangaacngaangnattcccccgtntttttttgaaanccccncttttcccntgaaaaaaaannnananannnnnnaaaaaaggngccccccnnag

SEQ ID NO: 380 - DNA, 1179 bp, Homo Sapiens
  misc_feature (9)..(9): n is a, c, g, or t
  misc_feature (885)..(885): n is a, c, g, or t
  misc_feature (903)..(903): n is a, c, g, or t
  misc_feature (918)..(918): n is a, c, g, or t
  misc_feature (939)..(939): n is a, c, g, or t
  misc_feature (942)..(942): n is a, c, g, or t
  misc_feature (946)..(946): n is a, c, g, or t
  misc_feature (974)..(974): n is a, c, g, or t
  misc_feature (995)..(995): n is a, c, g, or t
  misc_feature (999)..(999): n is a, c, g, or t
  misc_feature (1001)..(1001): n is a, c, g, or t
  misc_feature (1003)..(1003): n is a, c, g, or t
  misc_feature (1013)..(1013): n is a, c, g, or t
  misc_feature (1016)..(1016): n is a, c, g, or t
  misc_feature (1033)..(1033): n is a, c, g, or t
  misc_feature (1045)..(1045): n is a, c, g, or t
  misc_feature (1051)..(1051): n is a, c, g, or t
  misc_feature (1063)..(1063): n is a, c, g, or t
  misc_feature (1078)..(1078): n is a, c, g, or t
  misc_feature (1081)..(1081): n is a, c, g, or t
  misc_feature (1083)..(1083): n is a, c, g, or t
  misc_feature (1102)..(1102): n is a, c, g, or t
  misc_feature (1110)..(1110): n is a, c, g, or t
  misc_feature (1113)..(1113): n is a, c, g, or t
  misc_feature (1120)..(1120): n is a, c, g, or t
  misc_feature (1127)..(1127): n is a, c, g, or t
  misc_feature (1130)..(1130): n is a, c, g, or t
  misc_feature (1132)..(1132): n is a, c, g, or t
  misc_feature (1138)..(1138): n is a, c, g, or t
  misc_feature (1143)..(1143): n is a, c, g, or t
  misc_feature (1145)..(1145): n is a, c, g, or t
  misc_feature (1165)..(1165): n is a, c, g, or t
  misc_feature (1171)..(1171): n is a, c, g, or t
tagagaganttaactatgagaggatcgcatcaccatcaccatcacggatcctatttaggtgacactatagaatcgtcgacccacgcgtccggaaaccctgatgacatcacccaagaggagtatggagaattctacaagagcctcactaatgactgggaagaccacttggcagtcaagcacttttctgtagaaggtcagttggaattcagggcattgctatttattcctcgtcgggctccctttgacctttttgagaacaagaagaaaaagaacaacatcaaactctatgtccgccgtgtgttcatcatggacagctgtgatgagttgataccagagtatctcaattttatccgtggtgtggttgactctgaggatctgcccctgaacatctcccgagaaatgctccagcagagcaaaatcttgaaagtcattcgcaaaaacattgttaagaagtgccttgagctcttctctgagctggcagaagacaaggagaattacaagaaattctatgaggcattctctaaaaatctcaagcttggaatccacgaagactccactaaccgccgccgcctgtctgagctgctgcgctatcatacctcccagtctggagatgagatgacatctctgtcagagtatgtttctcgcatgaaggagacacagaagtccatctattacatcactggtgagagcaaagagcaggtggccaactcagcttttgtggagcgagtgcggaaacggggcttcgaggtggtatatatgaccgagcccattgacgagtactgtgtgcagcagctcaaggaatttgatgggaagagcctggtctcagttaccaaggagggtctggagctgcctgaggatgaggaggagaagaagaagatggaaganagcaaggcaaagtttganaacctctgcagctcntgaaagaaatcttaaaataanaangttnagaaggggacaatctccaaaagactggngtcttccccttgctgcattgngacnancncctacgggtnganagcccaaatgggagcgnatcatgaaaagncccagncccttcgggaanaactcccccatgggnctnantgaagggccaaaaagcccntggaaaancanccctganccccccnttngnggaaanccctncngcaaaaggctgaagccccanaaaaangaaaaggc

SEQ ID NO: 381 - DNA, 1122 bp, Homo Sapiens
  misc_feature (901)..(901): n is a, c, g, or t
  misc_feature (909)..(909): n is a, c, g, or t
  misc_feature (931)..(931): n is a, c, g, or t
  misc_feature (950)..(950): n is a, c, g, or t
  misc_feature (953)..(953): n is a, c, g, or t
  misc_feature (971)..(971): n is a, c, g, or t
  misc_feature (977)..(977): n is a, c, g, or t
  misc_feature (998)..(998): n is a, c, g, or t
  misc_feature (1019)..(1019): n is a, c, g, or t
  misc_feature (1025)..(1025): n is a, c, g, or t
  misc_feature (1029)..(1029): n is a, c, g, or t
  misc_feature (1032)..(1032): n is a, c, g, or t
  misc_feature (1035)..(1035): n is a, c, g, or t
  misc_feature (1037)..(1037): n is a, c, g, or t
  misc_feature (1039)..(1039): n is a, c, g, or t
  misc_feature (1047)..(1047): n is a, c, g, or t
  misc_feature (1056)..(1056): n is a, c, g, or t
  misc_feature (1081)..(1081): n is a, c, g, or t
  misc_feature (1087)..(1087): n is a, c, g, or t
  misc_feature (1101)..(1103): n is a, c, g, or t
  misc_feature (1105)..(1105): n is a, c, g, or t
  misc_feature (1109)..(1110): n is a, c, g, or t
  misc_feature (1121)..(1121): n is a, c, g, or t
attagaggaaattactatgagaggatcgcatcaccatcaccatcacggatcctatttaggtgacactatagaatcgtcgacccacgcgtccgcgaaagatgcagctcttgctactgcacttggtgacaaaaaaagtttagagggagatttggaggatctgaaggatcagattgcccagttggaagcctccttagctgcagccaaaaaacagttagcagatgaaactttacttaaagtagatttggagaatcgttgtcagagccttactgaggacttggagtttcgcaaaagcatgtatgaagaggagattaacgagaccagaaggaagcatgaaacgcgcttggtagaggtggattctgggcgtcaaattgagtatgagtacaagctggcgcaagcccttcatgagatgagagagcaacatgatgcccaagtgaggctgtataaggaggagctggagcagacttaccatgccaaacttgagaatgccagactgtcatcagagatgaatacttctactgtcaacagtgccagggaagaactgatggaaagccgcatgagaattgagagcctttcatcccagctttctaatctacagaaagagtctagagcatgtttggaaaggattcaagaattagaggacttgcttgctaaagaaaaagacaactctcgtcgcatgctgacagacaaagagagagagatggcggaaataagggatcaaatgcagcaacagctgaatgactatgaacagcttcttgatgtaaagttagccctggacatggaaatcagtgcttacaggaaactcttagaaggcgaagaagagaggttgaagctgtctccaagcccttcttcccgtgtgacagtatcccgagcatcctcaagtcgtagtgtacgtaccaactanaaggaaancggaagagggttgatgtggaanaatcaaaggcgagtagtantgnttagcatctctcattccncctcancccctggaaatgtttgcatcnaaaaaattgatgttgatgggnaaattntccnctnganancncttctgancaggatcanccaatggggaggctggaaatgatcnaaaaanttggaaacccctcnnncngttnnaaaaaaacccnc

SEQ ID NO: 382 - DNA, 1006 bp, Homo Sapiens
  misc_feature (790)..(790): n is a, c, g, or t
  misc_feature (836)..(836): n is a, c, g, or t
  misc_feature (863)..(864): n is a, c, g, or t
  misc_feature (871)..(871): n is a, c, g, or t
  misc_feature (889)..(889): n is a, c, g, or t
  misc_feature (896)..(896): n is a, c, g, or t
  misc_feature (930)..(930): n is a, c, g, or t
  misc_feature (935)..(935): n is a, c, g, or t
  misc_feature (944)..(944): n is a, c, g, or t
  misc_feature (948)..(949): n is a, c, g, or t
  misc_feature (971)..(971): n is a, c, g, or t
  misc_feature (979)..(979): n is a, c, g, or t
  misc_feature (985)..(986): n is a, c, g, or t
  misc_feature (988)..(988): n is a, c, g, or t
  misc_feature (991)..(999): n is a, c, g, or t
  misc_feature (1001)..(1006): n is a, c, g, or t
gagaaattactatgagaggatcgcatcaccatcaccatcacggatcctatttaggtgacactatagaatcgtcgacccacgcgtccgaaggagacgaagtcacactcatctgctctgcccgcggccatccagaccccaaactcagctggagccaattggggggcagccccgcagagccaatccccggacggcagggttgggtgagcagctctctgaccctgaaagtgaccagcgccctgagccgcgatggcatctcctgtgaagcctccaacccccacgggaacaagcgccatgtcttccacttcggcaccgtgagcccccagacctcccaggctggagtggccgtcatggccgtggccgtcagcgtgggcctcctgctcctcgtcgttgctgtcttctactgcgtgagacgcaaagggggcccctgctgccgccagcggcgggagaagggggctccgccgccaggggagccagggctgagccactcggggtcggagcaaccagagcagaccggccttctcatgggaggtgcctccggaggagccaggggtggcagcgggggcttcggagacgagtgctgagccaagaacctcctagaggctgtccctggacctggagctgcaggcatcagagaaccagccctgctcacgccatgcccgcccccgccttccctcttccctcttccctctccctgcccagccctcccttccttcctctgccggcaaggcagggacccacagtggctgcctgcctccgggagggaaggaaagggagggtgggtgggtggganggggccttcctccagggaatgtgactctcccaggccccaaaaatanctcctggacccaagcccaaaggcccannctggganaaaggctcccaagggtcnggctggnccggaactattttttacctcccgccttcccctgntgggncccccaccntganntcttgctgcaaaatctgaaaantggattcncccccnntnacnnnnnnnnngnnnnnn

SEQ ID NO: 383 - DNA, 1179 bp, Homo Sapiens
  misc_feature (1)..(1): n is a, c, g, or t
  misc_feature (3)..(3): n is a, c, g, or t
  misc_feature (839)..(839): n is a, c, g, or t
  misc_feature (856)..(856): n is a, c, g, or t
  misc_feature (901)..(901): n is a, c, g, or t
  misc_feature (918)..(918): n is a, c, g, or t
  misc_feature (931)..(931): n is a, c, g, or t
  misc_feature (936)..(936): n is a, c, g, or t
  misc_feature (941)..(941): n is a, c, g, or t
  misc_feature (943)..(943): n is a, c, g, or t
  misc_feature (962)..(962): n is a, c, g, or t
  misc_feature (980)..(980): n is a, c, g, or t
  misc_feature (987)..(987): n is a, c, g, or t
  misc_feature (989)..(989): n is a, c, g, or t
  misc_feature (991)..(991): n is a, c, g, or t
  misc_feature (994)..(994): n is a, c, g, or t
  misc_feature (1051)..(1051): n is a, c, g, or t
  misc_feature (1064)..(1064): n is a, c, g, or t
  misc_feature (1069)..(1069): n is a, c, g, or t
  misc_feature (1076)..(1076): n is a, c, g, or t
  misc_feature (1090)..(1090): n is a, c, g, or t
  misc_feature (1094)..(1094): n is a, c, g, or t
  misc_feature (1097)..(1097): n is a, c, g, or t
  misc_feature (1105)..(1105): n is a, c, g, or t
  misc_feature (1108)..(1108): n is a, c, g, or t
  misc_feature (1122)..(1122): n is a, c, g, or t
  misc_feature (1128)..(1128): n is a, c, g, or t
  misc_feature (1133)..(1133): n is a, c, g, or t
  misc_feature (1139)..(1139): n is a, c, g, or t
  misc_feature (1170)..(1170): n is a, c, g, or t
nanttagagaaattactatgagaggatcgcatcaccatcaccatcacggatcctatttaggtgacactatagaatcgtcgacccacgcgtccgccgacatgctgcgccgcgctctgctgtgcctggccgtggccgccctggtgcgcgccgacgcccccgaggaggaggaccacgtcctggtgctgcggaaaagcaacttcgcggaggcgctggcggcccacaagtacctgctggtggagttctatgccccttggtgtggccactgcaaggctctggcccctgagtatgccaaagccgctgggaagctgaaggcagaaggttccgagatcaggttggccaaggtggacgccacggaggagtctgacctggcccagcagtacggcgtgcgcggctatcccaccatcaagttcttcaggaatggagacacggcttcccccaaggaatatacagctggcagagaggctgatgacatcgtgaactggctgaagaagcgcacgggcccggctgccaccaccctgcctgacggcgcagctgcagagtccttggtggagtccagcgaggtggctgtcatcggcttcttcaaggacgtggagtcggactctgccaagcagtttttgcaggcagcagaggccatcgatgacataccatttgggatcacttccaacagtgacgtgttctccaaataccagctcgacaaagatggggttgtcctctttaagaagtttgatgaaggccggaacaactttgaaggggaggtcaccaaggagaacctgctggactttatcaaacacaaccagctgccccttgtcatcgagttcaccgagcagacagccccgaanatttttggaggtgaaantcaagactcacatcctgctgttcttgcccaaagagtgtgtctgantatgacggcaaactgancaacttcaaaaanagcanccganancttcaagggcaaaatcttnttcatcttcatcgaaagncgaacanancnganaaccaagcgcattcctccaatttttttggcctgaaaaaagaaaaaatgccccggccntgccccctcattnccctnggaggangaaaatgacccaanttanaanccccaatncgnaaaaacttaacgcnaaaaangatcnaaaaantttttgcccccccttcctggaagggaaaaantcaaccccc

SEQ ID NO: 384 - DNA, 1080 bp, Homo Sapiens
  misc_feature (1)..(1): n is a, c, g, or t
  misc_feature (3)..(3): n is a, c, g, or t
  misc_feature (866)..(866): n is a, c, g, or t
  misc_feature (893)..(893): n is a, c, g, or t
  misc_feature (898)..(898): n is a, c, g, or t
  misc_feature (912)..(912): n is a, c, g, or t
  misc_feature (923)..(923): n is a, c, g, or t
  misc_feature (931)..(931): n is a, c, g, or t
  misc_feature (943)..(943): n is a, c, g, or t
  misc_feature (949)..(949): n is a, c, g, or t
  misc_feature (979)..(979): n is a, c, g, or t
  misc_feature (989)..(989): n is a, c, g, or t
  misc_feature (991)..(991): n is a, c, g, or t
  misc_feature (996)..(996): n is a, c, g, or t
  misc_feature (1021)..(1021): n is a, c, g, or t
  misc_feature (1033)..(1033): n is a, c, g, or t
  misc_feature (1038)..(1038): n is a, c, g, or t
  misc_feature (1041)..(1041): n is a, c, g, or t
  misc_feature (1047)..(1048): n is a, c, g, or t
  misc_feature (1063)..(1075): n is a, c, g, or t
  misc_feature (1078)..(1078): n is a, c, g, or t
  misc_feature (1080)..(1080): n is a, c, g, or t
nantagagaaattactatgagaggatcgcatcaccatcaccatcacggatcctatttaggtgacactatagaatcgtcgacccacgcgtccgctcctcctggccctgtagcccagcccactggcccgcaaccacaatctgcgggctctacctctggccctgtaccccagcctgcctgcccaccccctggccctgcaccccaccccactggccctcctgggcccatccctgtccccgcgccaccccagattgccacctccaccagcctcctggctgcccagtcacttgtgccaccccctgggctgcctggctccagcaccccaggagttttgccttacttcccacctggcctgccgcccccagacgccgggggagcccctcagtcttccatgtcagagtcacctgatgtcaaccttgtgacccagcagctatctaagtcacaggtggaggaccccctgccccctgtgttctcaggcacaccaaagggcagtggggctggctacggtgttggctttgacctggaggaattcttaaaccagtctttcgacatgggcgtggctgatgggccacaggatggccaggcagattcagcctctctctcagcctccctgcttgctgactggctcgaaggccatggcatgaaccctgccgatattgagtccctgcagcgtgagatccagatggactccccaatgctgctggctgacctgcctgacctccaggacccctgaggcccccagcctgtgccttgctgccacagtagacctagttccaggatccatgggagcattctcaaaggctttagccctggacccagcaggtgaggctcgggcttggattattctgcaggtttcatctcaaaaccancttttcagccttaagcagccacctganccacnaccgaagccatggnaggatcggganaacccaantccccctgaaanaatccnttttcagaataaatttttaataataataanggtaataatnanccggnctttttgccatcaaaaatgaaggcntgggaaaaaaanggttnccnttttgnncctggaaaaaaaaannnnnnnnnnnnnaanan

SEQ ID NO: 385 - DNA, 1225 bp, Homo Sapiens
  misc_feature (3)..(3): n is a, c, g, or t
  misc_feature (922)..(922): n is a, c, g, or t
  misc_feature (930)..(930): n is a, c, g, or t
  misc_feature (952)..(952): n is a, c, g, or t
  misc_feature (979)..(979): n is a, c, g, or t
  misc_feature (991)..(991): n is a, c, g, or t
  misc_feature (997)..(997): n is a, c, g, or t
  misc_feature (1003)..(1003): n is a, c, g, or t
  misc_feature (1007)..(1007): n is a, c, g, or t
  misc_feature (1017)..(1017): n is a, c, g, or t
  misc_feature (1034)..(1034): n is a, c, g, or t
  misc_feature (1037)..(1037): n is a, c, g, or t
  misc_feature (1069)..(1069): n is a, c, g, or t
  misc_feature (1075)..(1075): n is a, c, g, or t
  misc_feature (1078)..(1078): n is a, c, g, or t
  misc_feature (1091)..(1091): n is a, c, g, or t
  misc_feature (1095)..(1095): n is a, c, g, or t
  misc_feature (1098)..(1098): n is a, c, g, or t
  misc_feature (1110)..(1110): n is a, c, g, or t
  misc_feature (1112)..(1112): n is a, c, g, or t
  misc_feature (1126)..(1126): n is a, c, g, or t
  misc_feature (1134)..(1134): n is a, c, g, or t
  misc_feature (1140)..(1140): n is a, c, g, or t
  misc_feature (1145)..(1145): n is a, c, g, or t
  misc_feature (1152)..(1152): n is a, c, g, or t
  misc_feature (1155)..(1155): n is a, c, g, or t
  misc_feature (1171)..(1171): n is a, c, g, or t
  misc_feature (1178)..(1179): n is a, c, g, or t
  misc_feature (1186)..(1186): n is a, c, g, or t
  misc_feature (1190)..(1190): n is a, c, g, or t
  misc_feature (1198)..(1199): n is a, c, g, or t
  misc_feature (1202)..(1202): n is a, c, g, or t
  misc_feature (1207)..(1207): n is a, c, g, or t
  misc_feature (1209)..(1209): n is a, c, g, or t
  misc_feature (1216)..(1217): n is a, c, g, or t
  misc_feature (1219)..(1220): n is a, c, g, or t
ctntagagaaattactatgagaggatcgcatcaccatcaccatcacggatcctatttaggtgacactatagaatcgtcgacccacgcgtccgcccacgcgtccgagtgtctgaaggatggtgctggggatgtggcctttgtcaagcactcgactatatttgagaacttggcaaacaaggctgacagggaccagtatgagctgctttgcctggacaacacccggaagccggtagatgaatacaaggactgccacttggcccaggtcccttctcataccgtcgtggcccgaagtatgggcggcaaggaggacttgatctgggagcttctcaaccaggcccaggaacattttggcaaagacaaatcaaaagaattccaactattcagctctcctcatgggaaggacctgctgtttaaggactctgcccacgggtttttaaaagtcccccccaggatggatgccaagatgtacctgggctatgagtatgtcactgccatccggaatctacgggaaggcacatgcccagaagccccaacagatgaatgcaagcctgtgaagtggtgtgcgctgagccaccacgagaggctcaagtgtgatgagtggagtgttaacagtgtagggaaaatagagtgtgtatcagcagagaccaccgaagactgcatcgccaagatcatgaatggagaagctgatgccatgagcttggatggagggtttgtctacatagcgggcaagtgtggtctggtgcctgtcttggcagaaaactacaataagagcgataattgtgaggatacaccagaggcagggtattttgctgtagcagtggtgaagaaaatcagcttctgacctcacctgggacaatctgaaaggcaagaagtcctgccatacggcagttggcaaaaccgctggctggaaaattcccatggncctgctcnacaaaaaatcaaccccctgcanatttgatgaatttttcagtgaaggtgngcccctgggtcnaaaaanactccntctntgtaacctgngtttgggctcaggcctnaanctcctgtgaacccaacaaccaaaaaagggaanctacgnctncccgggccctttncagngtntggtttaaaaangnaatttggccctttngaaacccnaaactntcccnaaaaacnctngggaaaaaaaccccgntcctggnntaaaatntaangaaaaaannttnattgntntcccttnngnnccaaa

SEQ ID NO: 386 - DNA, 1180 bp, Homo Sapiens
  misc_feature (1)..(1): n is a, c, g, or t
  misc_feature (783)..(783): n is a, c, g, or t
  misc_feature (829)..(829): n is a, c, g, or t
  misc_feature (902)..(902): n is a, c, g, or t
  misc_feature (942)..(942): n is a, c, g, or t
  misc_feature (949)..(949): n is a, c, g, or t
  misc_feature (952)..(952): n is a, c, g, or t
  misc_feature (960)..(960): n is a, c, g, or t
  misc_feature (967)..(967): n is a, c, g, or t
  misc_feature (970)..(970): n is a, c, g, or t
  misc_feature (975)..(975): n is a, c, g, or t
  misc_feature (984)..(984): n is a, c, g, or t
  misc_feature (1045)..(1045): n is a, c, g, or t
  misc_feature (1047)..(1047): n is a, c, g, or t
  misc_feature (1054)..(1054): n is a, c, g, or t
  misc_feature (1074)..(1074): n is a, c, g, or t
  misc_feature (1077)..(1077): n is a, c, g, or t
  misc_feature (1081)..(1081): n is a, c, g, or t
  misc_feature (1086)..(1086): n is a, c, g, or t
  misc_feature (1104)..(1104): n is a, c, g, or t
  misc_feature (1107)..(1107): n is a, c, g, or t
  misc_feature (1112)..(1112): n is a, c, g, or t
  misc_feature (1116)..(1116): n is a, c, g, or t
  misc_feature (1120)..(1120): n is a, c, g, or t
  misc_feature (1136)..(1136): n is a, c, g, or t
  misc_feature (1139)..(1139): n is a, c, g, or t
  misc_feature (1141)..(1141): n is a, c, g, or t
  misc_feature (1145)..(1145): n is a, c, g, or t
  misc_feature (1149)..(1150): n is a, c, g, or t
  misc_feature (1155)..(1155): n is a, c, g, or t
  misc_feature (1157)..(1157): n is a, c, g, or t
  misc_feature (1170)..(1171): n is a, c, g, or t
  misc_feature (1176)..(1177): n is a, c, g, or t
naatagagaaattactatgagaggatcgcatcaccatcaccatcacggatcctatttaggtgacactatagaatcgtcgacccacgcgtccgcccacgcgtccggcctgaaggcggaggtcctgtccttcatcctggaggatgtgcgggcccgcctggacctggccttcgcctggctctaccaggagtacaacgcctacctggccgcaggtgcctcgggctccctggacaagtatgaggactgcctcatccgcctgttgtctggcctgcaggagaaaccagaccagaaggatgggatcttcaccaaggttgtgctggaggcgccactcatcacagagagtgccctggaggtggtccgcaagtactgcgaggatgagagtcgcacctatctgggcatgtccacacttcgagacctgatcttcaagcgcccgtcccgccagttccagtacctgcatgtcctcctcgacctcagctcccatgagaaggacaaggtgcgctcccaggccctgctgttcatcaaacgcatgtatgagaaggagcagctgcgggagtatgtggagaaatttgccctcaactacctgcagctcctggtgcaccccaacccaccgtctgtgctgtttggagctgacaaggacacagaggtggcagcaccctggacggaggagacagtgaagcagtgtctgtacctctacctggccctcctgcctcagaaccacaagctgatccacgaactggcggccgtgtacactgaagccatcgccgacatcaagcggacggtgctganggtcattgagcagccgatccgaggaatgggcatgaactccccgganctgctcctgctggtggaaaattgtcccaagggagcaaaaacactggtcacgaaatgtctgcacagcctcacanacaaagttcccacccttccccaaaagctggtgaaacgggntccgggnatntctaccanaagcgantgncaaangtccgcttncttcatcccggtgctcaatgggctggaaaaaaaaaaaggtgatccaaggccctgcctaaantnataaaantcaacccatcgggtgaaagnaantttnaaccncctgctgggcacccacanggnggagnaaantcanccttttccccctgaanccngnaaanttcnngattncnttaaaaaaaattnnatccnngaa

SEQ ID NO: 387 - DNA, 1206 bp, Homo Sapiens
  misc_feature (1)..(1): n is a, c, g, or t
  misc_feature (827)..(827): n is a, c, g, or t
  misc_feature (908)..(908): n is a, c, g, or t
  misc_feature (953)..(953): n is a, c, g, or t
  misc_feature (956)..(956): n is a, c, g, or t
  misc_feature (974)..(974): n is a, c, g, or t
  misc_feature (998)..(998): n is a, c, g, or t
  misc_feature (1000)..(1000): n is a, c, g, or t
  misc_feature (1014)..(1014): n is a, c, g, or t
  misc_feature (1016)..(1016): n is a, c, g, or t
  misc_feature (1018)..(1018): n is a, c, g, or t
  misc_feature (1038)..(1038): n is a, c, g, or t
  misc_feature (1041)..(1041): n is a, c, g, or t
  misc_feature (1044)..(1044): n is a, c, g, or t
  misc_feature (1052)..(1052): n is a, c, g, or t
  misc_feature (1075)..(1075): n is a, c, g, or t
  misc_feature (1081)..(1081): n is a, c, g, or t
  misc_feature (1103)..(1103): n is a, c, g, or t
  misc_feature (1109)..(1109): n is a, c, g, or t
  misc_feature (1140)..(1140): n is a, c, g, or t
  misc_feature (1144)..(1144): n is a, c, g, or t
  misc_feature (1152)..(1152): n is a, c, g, or t
  misc_feature (1156)..(1156): n is a, c, g, or t
  misc_feature (1158)..(1158): n is a, c, g, or t
  misc_feature (1169)..(1170): n is a, c, g, or t
  misc_feature (1172)..(1172): n is a, c, g, or t
  misc_feature (1174)..(1174): n is a, c, g, or t
  misc_feature (1178)..(1178): n is a, c, g, or t
  misc_feature (1183)..(1183): n is a, c, g, or t
  misc_feature (1187)..(1187): n is a, c, g, or t
  misc_feature (1194)..(1194): n is a, c, g, or t
  misc_feature (1201)..(1201): n is a, c, g, or t
  misc_feature (1203)..(1203): n is a, c, g, or t
naatagagaaattactatgagaggatcgcatcaccatcaccatcacggatcctatttaggtgacactatagaatcgtcgacccacgcgtccgtacaggagtgcatcctgctggtgactcagcgcatcaccaagtacccgttactcatcagccgcatcctgcagcattcccacgggatcgaggaggagcgccaggacctgaccacagcactggggctagtgaaggagctgctgtccaatgtggacgagggtatttatcagctggagaaaggggcccgtctgcaggagatctacaaccgcatggaccctcgggcccaaaccccagtgcctggcaagggcccctttggccgagaggaacttctgaggcgcaaactcatccacgatggctgcctgctctggaagacagcgacggggcgcttcaaagatgtgctagtgctgctgatgacagatgtactggtgtttctccaggaaaaggaccagaagtacatctttcctaccctggacaagccttcagtggtatcgctgcagaatctaatcgtacgagacattgccaaccaggagaaagggatgtttctgatcagcgcagccccacctgagatgtacgaggtgcacacagcatcccgggatgaccggagcacctggatccgggtcattcagcagagcgtgcgcacatgcccatccagggaggacttccccctgattgagacagaggatgaggcttacctgcggcgaattaagatggagttgcagcagaaggaccgggcactggtggagctgctgcgagagaaggtcgggctgtttgctgagatgacccatttccaggccgaanaggatggtggcagtgggatggccctgcccaccctgcccaggggccttttccgctctgagtcccttgagtcccctcgtggcnagcggctgctgcaggatgccatccgtgaggtggagggtctgaaanacntgctggtggggccagaantggaactgctcttgacaccccgananccagccctgccctngnancaaaaaacggtggtaacacnaantcntggggtcnctgccaatggtgaagccaaaacnttcaanggctccattgaactctgcaaanctgacncaactctacccaaaggatcaaatggaaatcncctnaaatcccncaanangaggggtttanncnantggncaatnttanggacttntaaaggncnaaa

SEQ ID NO: 388 - DNA, 1205 bp, Homo Sapiens
  misc_feature (4)..(4): n is a, c, g, or t
  misc_feature (10)..(10): n is a, c, g, or t
  misc_feature (14)..(14): n is a, c, g, or t
  misc_feature (20)..(20): n is a, c, g, or t
  misc_feature (28)..(28): n is a, c, g, or t
  misc_feature (886)..(886): n is a, c, g, or t
  misc_feature (899)..(899): n is a, c, g, or t
  misc_feature (944)..(944): n is a, c, g, or t
  misc_feature (949)..(949): n is a, c, g, or t
  misc_feature (960)..(960): n is a, c, g, or t
  misc_feature (973)..(973): n is a, c, g, or t
  misc_feature (995)..(995): n is a, c, g, or t
  misc_feature (1004)..(1004): n is a, c, g, or t
  misc_feature (1007)..(1007): n is a, c, g, or t
  misc_feature (1010)..(1010): n is a, c, g, or t
  misc_feature (1012)..(1012): n is a, c, g, or t
  misc_feature (1039)..(1039): n is a, c, g, or t
  misc_feature (1051)..(1051): n is a, c, g, or t
  misc_feature (1053)..(1053): n is a, c, g, or t
  misc_feature (1069)..(1069): n is a, c, g, or t
  misc_feature (1079)..(1079): n is a, c, g, or t
  misc_feature (1082)..(1082): n is a, c, g, or t
  misc_feature (1084)..(1084): n is a, c, g, or t
  misc_feature (1088)..(1088): n is a, c, g, or t
  misc_feature (1094)..(1094): n is a, c, g, or t
  misc_feature (1100)..(1100): n is a, c, g, or t
  misc_feature (1114)..(1114): n is a, c, g, or t
  misc_feature (1116)..(1117): n is a, c, g, or t
  misc_feature (1119)..(1119): n is a, c, g, or t
  misc_feature (1125)..(1125): n is a, c, g, or t
  misc_feature (1132)..(1132): n is a, c, g, or t
  misc_feature (1158)..(1158): n is a, c, g, or t
  misc_feature (1160)..(1160): n is a, c, g, or t
  misc_feature (1170)..(1170): n is a, c, g, or t
  misc_feature (1174)..(1174): n is a, c, g, or t
  misc_feature (1182)..(1182): n is a, c, g, or t
  misc_feature (1190)..(1190): n is a, c, g, or t
  misc_feature (1192)..(1192): n is a, c, g, or t
  misc_feature (1194)..(1194): n is a, c, g, or t
atanagaganttantatganaggatgcntcaccatcaccatcgcggatcctatttaggtgacactatagaatcgtcgacccacgcgtccgccatgatagaacagcagaagcgtaagggcccagagttgccgctggttccagtcaagcggcagcggcatgagttgctgttgggagcggggtctggcccaggagccgggcagcagcaggcgacgccgggagccttgctgcaagcgggacctccaagatgttcctcccttcaagccccaatcatgctgctctctggacatgaaggggaagtctactgctgcaagttccaccccaacggatccaccttagcatctgcaggatttgaccgactgatattactgtggaatgtctatggtgactgtgataactatgccacactgaagggacacagtggagcagtgatggaattgcattacaacacagatggcagtatgcttttctcagcatccacagataaaaccgtggctgtgtgggatagtgaaacaggtgagagggttaaaaggctaaagggacatacttcctttgtgaattcctgttatccagccaggagaggccctcagcttgtctgcactggcagtgacgatggcacagttaagctttgggacatccggaagaaagcagccatccagacatttcagaacacgtaccaggtgttagctgtgaccttcaatgacacaagtgatcagattatttctggtggaatagacaatgatatcaaggtctgggacctgcgccagaacaagctaacctacaccatgagaggccatgcagattcagtgactggcctgagtttaagttctgaaggctcttatcttttgtccaatgcaatggacaatacagttcgtgtctgggatgtccngccatttgccccnaaagagagatgtgtaagatatttcaaggaaatgtgcacaactttngaaanaaccttctganatgttcttggtcncctgatggaacaaaaataccanctggctcanccnaangnttttttatgtgtgggaaaccccaagcnggaaaatattgntnaagctgcccggccatnctggctccancangnaagngctttncccccnggatgaacccctcntnntncccccnccaaggnaaaaaaaatttttttggggaaaaatncnttgaaaaatngaanggaaaacnccagggcncntnttttttaaacc

SEQ ID NO: 389 - DNA, 1081 bp, Homo Sapiens
  misc_feature (636)..(636): n is a, c, g, or t
  misc_feature (822)..(822): n is a, c, g, or t
  misc_feature (875)..(875): n is a, c, g, or t
  misc_feature (906)..(906): n is a, c, g, or t
  misc_feature (908)..(909): n is a, c, g, or t
  misc_feature (916)..(916): n is a, c, g, or t
  misc_feature (922)..(922): n is a, c, g, or t
  misc_feature (957)..(957): n is a, c, g, or t
  misc_feature (970)..(970): n is a, c, g, or t
  misc_feature (974)..(974): n is a, c, g, or t
  misc_feature (987)..(987): n is a, c, g, or t
  misc_feature (992)..(992): n is a, c, g, or t
  misc_feature (998)..(998): n is a, c, g, or t
  misc_feature (1009)..(1009): n is a, c, g, or t
  misc_feature (1011)..(1011): n is a, c, g, or t
  misc_feature (1017)..(1017): n is a, c, g, or t
  misc_feature (1026)..(1026): n is a, c, g, or t
  misc_feature (1031)..(1031): n is a, c, g, or t
  misc_feature (1034)..(1035): n is a, c, g, or t
  misc_feature (1040)..(1040): n is a, c, g, or t
  misc_feature (1045)..(1045): n is a, c, g, or t
  misc_feature (1051)..(1051): n is a, c, g, or t
  misc_feature (1063)..(1063): n is a, c, g, or t
  misc_feature (1074)..(1075): n is a, c, g, or t
  misc_feature (1078)..(1078): n is a, c, g, or t
  misc_feature (1080)..(1080): n is a, c, g, or t
agaaattaactatgagaggatcgcatcaccatcaccatcacggatcctatttaggtgacactatagaatcgtcgacccacgcgtccgcgctggtgtatgatgaggaaatcatggctggctgggcacctgatgactctaacctcaacacaacctgccccttctgcgcctgcccctttgtgcccctgctcagtgtccagacccttgattcccggcccagtgtccccagccccaaatctgctggtgccagtggcagcaaagatgctcctgtccctggtggtcctggccctgtgctcagtgaccgaaggctctgccttgctctggatgagccccagctctgcaacgggcacatgggggtaagggctgggccaaaggggcatgaggaacgggaatgttgccctgtgtggggcctgtggggtgccagggagagatgggcacatctcttgcccttgagggcaaggggcatcccaaaagctgttggatgtggtggctcagtgggaggcaaggctctggggatgtacatgccctctactgccctccccctttgtgcctgatagggagcctcccggcgggttgagagtggggcatgggcatacctgagccccctggtgctgcgtaaggagctggagtcgctggtanagaacgagggcagtgaggtgctggcgttgcctgaactgccctctgcccaccccatcatcttctggaaccttttgtggtatttccaacggctacgcctgcccagtattctaccaggcctggtgctggcctcctgtgatgggccttcgcactcccaggccccatctccttggctaacccctgatccanccctctgttcaggtacggctgctgtgggatgtactgacccctgaccccaatanctgcccacctctctatgtgctctggaaggtncnnaattgantctggnatttggcctgggtggggaagggtggggtcccatancccaaaaaggctnaatnaattctggggggnctttnttttcnttttcatccangncaaaantcccccaancgggnggnnaaggnccagnccctgnaactgcatcccnttaatttggcnntgntng

SEQ ID NO: 390 - DNA, 1226 bp, Homo Sapiens
  misc_feature (849)..(849): n is a, c, g, or t
  misc_feature (885)..(885): n is a, c, g, or t
  misc_feature (900)..(900): n is a, c, g, or t
  misc_feature (912)..(912): n is a, c, g, or t
  misc_feature (953)..(953): n is a, c, g, or t
  misc_feature (963)..(963): n is a, c, g, or t
  misc_feature (1001)..(1002): n is a, c, g, or t
  misc_feature (1030)..(1030): n is a, c, g, or t
  misc_feature (1036)..(1036): n is a, c, g, or t
  misc_feature (1049)..(1049): n is a, c, g, or t
  misc_feature (1051)..(1051): n is a, c, g, or t
  misc_feature (1070)..(1070): n is a, c, g, or t
  misc_feature (1083)..(1083): n is a, c, g, or t
  misc_feature (1096)..(1096): n is a, c, g, or t
  misc_feature (1100)..(1101): n is a, c, g, or t
  misc_feature (1107)..(1107): n is a, c, g, or t
  misc_feature (1109)..(1109): n is a, c, g, or t
  misc_feature (1114)..(1114): n is a, c, g, or t
  misc_feature (1120)..(1120): n is a, c, g, or t
  misc_feature (1128)..(1128): n is a, c, g, or t
  misc_feature (1130)..(1130): n is a, c, g, or t
  misc_feature (1134)..(1134): n is a, c, g, or t
  misc_feature (1146)..(1146): n is a, c, g, or t
  misc_feature (1154)..(1155): n is a, c, g, or t
  misc_feature (1158)..(1158): n is a, c, g, or t
  misc_feature (1160)..(1160): n is a, c, g, or t
  misc_feature (1168)..(1168): n is a, c, g, or t
  misc_feature (1170)..(1170): n is a, c, g, or t
  misc_feature (1172)..(1172): n is a, c, g, or t
  misc_feature (1181)..(1181): n is a, c, g, or t
  misc_feature (1184)..(1184): n is a, c, g, or t
  misc_feature (1188)..(1188): n is a, c, g, or t
aatagagaaattactatgagaggatcgcatcaccatcaccatcacggatcctatttaggtgacactatagaatcgtcgacccacgcgtccggtccgctttcgtctccgtcctgctgccgttaccgccgctgctgccgccgcttgcgtcccccgctccggtctgtggtgcagccgggacccaggaccatgtctctgtctcgctcagaggagatgcaccggctcacggaaaatgtctataagaccatcatggagcagttcaaccctagcctccggaacttcatcgccatggggaagaattacgagaaggcactggcaggtgtgacgtatgcagccaaaggctactttgacgccctggtgaagatgggggagctggccagcgagagccagggctccaaagaactcggagacgttctcttccagatggctgaagtccacaggcagatccagaatcagctggaagaaatgctgaagtcttttcacaacgagctgcttacgcagctggagcagaaggtggagctggactccaggtatctgagtgctgcgctgaagaaataccagactgagcaaaggagcaaaggcgacgccctggacaagtgtcaggctgagctgaagaagcttcggaagaagagccagggcagcaagaatcctcagaagtactcggacaaggagctgcagtacatcgacgccatcagcaacaagcagggcgagctggagaattacgtgtccgacggctacaagaccgcactgacagaggagcgcaggcgcttctgcttcctggtggagaagcagtgcgccgtggccaagaactccgcggcctaccactccaagggcaaggagctgctggcgcanaagctgccgctgtggcaacaggcctgtgccgacccnagcaagatcccggancgcgcggtgcanctcatgcagcaggtggccagcaacggcgccacccttccccnagcgccctgntcggcccccaagtccaacctgggtcatttccgaccccnnttccggggggccaagcccctgccggggncccccnaagctggcaccgntncgtggggggggatttctgncccagaaaaaccnacccatcatgaancggnntccaangncccgnatgggnagaaaaanancccntggggctgaccncaagggtnnccnanccaaaatncntntttcccccngantttnaaaaaaagtttagggaatcttatttcaaaaaaattccc

SEQ ID NO: 391 - DNA, 1252 bp, Homo Sapiens
  misc_feature (872)..(872): n is a, c, g, or t
  misc_feature (905)..(905): n is a, c, g, or t
  misc_feature (921)..(921): n is a, c, g, or t
  misc_feature (923)..(923): n is a, c, g, or t
  misc_feature (945)..(945): n is a, c, g, or t
  misc_feature (952)..(952): n is a, c, g, or t
  misc_feature (965)..(965): n is a, c, g, or t
  misc_feature (972)..(972): n is a, c, g, or t
  misc_feature (995)..(995): n is a, c, g, or t
  misc_feature (997)..(997): n is a, c, g, or t
  misc_feature (1020)..(1020): n is a, c, g, or t
  misc_feature (1025)..(1025): n is a, c, g, or t
  misc_feature (1029)..(1029): n is a, c, g, or t
  misc_feature (1051)..(1051): n is a, c, g, or t
  misc_feature (1056)..(1057): n is a, c, g, or t
  misc_feature (1066)..(1066): n is a, c, g, or t
  misc_feature (1073)..(1073): n is a, c, g, or t
  misc_feature (1082)..(1082): n is a, c, g, or t
  misc_feature (1095)..(1095): n is a, c, g, or t
  misc_feature (1098)..(1098): n is a, c, g, or t
  misc_feature (1105)..(1105): n is a, c, g, or t
  misc_feature (1117)..(1117): n is a, c, g, or t
  misc_feature (1126)..(1126): n is a, c, g, or t
  misc_feature (1137)..(1137): n is a, c, g, or t
  misc_feature (1146)..(1146): n is a, c, g, or t
  misc_feature (1150)..(1150): n is a, c, g, or t
  misc_feature (1156)..(1156): n is a, c, g, or t
  misc_feature (1166)..(1166): n is a, c, g, or t
  misc_feature (1170)..(1170): n is a, c, g, or t
  misc_feature (1176)..(1176): n is a, c, g, or t
  misc_feature (1180)..(1180): n is a, c, g, or t
  misc_feature (1187)..(1187): n is a, c, g, or t
  misc_feature (1195)..(1195): n is a, c, g, or t
  misc_feature (1198)..(1198): n is a, c, g, or t
  misc_feature (1203)..(1203): n is a, c, g, or t
  misc_feature (1212)..(1212): n is a, c, g, or t
  misc_feature (1220)..(1220): n is a, c, g, or t
  misc_feature (1229)..(1229): n is a, c, g, or t
  misc_feature (1231)..(1231): n is a, c, g, or t
  misc_feature (1245)..(1245): n is a, c, g, or t
gagaaattactatgagaggatcgcatcaccatcaccatcacggatcctatttaggtgacactatagaatcgtcgacccacgcgtccgtggaaaagggcattgaaatcttgactgacatgtctcgacctgtggaactgagtgacagagaaactttgttaaatagtgcaaccacttcactgaactcaaaggtggtttctcagtattcaagtctgctttctccaatgagtgtaaatgcagtgatgaaagtgattgacccagccacagccaccagtgtagatcttagagatattaaaatagttaagaagcttggtgggacaattgatgactgtgagttggtggaagggctggttctcacccaaaaagtgtcaaattctggcataaccagagttgaaaaggccaagattgggcttattcagttttgcttatctgctcccaaaacagacatggataatcaaatagtggtttctgactatgcccagatggaccgagtgctgcgagaagagagagcctatattttaaatttagtgaagcaaattaaaaaaacaggatgtaatgtccttctcatacagaaatctattctaagagatgctcttagtgatcttgcattacactttctgaataaaatgaagatcatggtgattaaggatattgaaagagaagacattgaattcatttgtaagacaattggaaccaagccagttgctcatattgaccaatttactgctgacatgctgggttctgctgagttagctgaggaggtcaatttaaatggttctggcaaactgctcaagattacaggctgtgccagccctggaaaaacagttacaattgttgttcgtggttctaacaaactggtgattgaagaagctgancgctccattcatgatgccctatgtgttatcccnttgtttagtgaaaaananggctcttattgcaggaggtggngctccanaaataaagttggnccctacnatttaactgaatattcccgaacncnggaggggatggaatcccactgcntttcnggcntttgcaaatgctatggaggtcnttccnnctaccctanctgaaanggccggccngaatcccctttcnccngtaacanaactaaaaaccngcctgcccngggaaaaaaanccgccggcnttantgtccnaaaggggggnattncccaantttngaaaaancgggttgnccnccccnggtgggaanaaacaggncccgaaccntngcaacgaaacggtncgaacat

SEQ ID NO: 392 - DNA, 1206 bp, Homo Sapiens
  misc_feature (933)..(933): n is a, c, g, or t
  misc_feature (956)..(956): n is a, c, g, or t
  misc_feature (970)..(970): n is a, c, g, or t
  misc_feature (976)..(977): n is a, c, g, or t
  misc_feature (982)..(982): n is a, c, g, or t
  misc_feature (985)..(985): n is a, c, g, or t
  misc_feature (991)..(991): n is a, c, g, or t
  misc_feature (1006)..(1006): n is a, c, g, or t
  misc_feature (1015)..(1015): n is a, c, g, or t
  misc_feature (1035)..(1035): n is a, c, g, or t
  misc_feature (1037)..(1037): n is a, c, g, or t
  misc_feature (1042)..(1042): n is a, c, g, or t
  misc_feature (1048)..(1048): n is a, c, g, or t
  misc_feature (1051)..(1051): n is a, c, g, or t
  misc_feature (1053)..(1053): n is a, c, g, or t
  misc_feature (1055)..(1055): n is a, c, g, or t
  misc_feature (1061)..(1061): n is a, c, g, or t
  misc_feature (1083)..(1083): n is a, c, g, or t
  misc_feature (1097)..(1097): n is a, c, g, or t
  misc_feature (1102)..(1102): n is a, c, g, or t
  misc_feature (1106)..(1106): n is a, c, g, or t
  misc_feature (1112)..(1112): n is a, c, g, or t
  misc_feature (1122)..(1122): n is a, c, g, or t
  misc_feature (1146)..(1146): n is a, c, g, or t
  misc_feature (1151)..(1151): n is a, c, g, or t
  misc_feature (1165)..(1165): n is a, c, g, or t
  misc_feature (1171)..(1171): n is a, c, g, or t
  misc_feature (1199)..(1199): n is a, c, g, or t
  misc_feature (1202)..(1202): n is a, c, g, or t
aatagagaaattactatgagaggatcgcatcaccatcaccatcacggatcctatttaggtgacactatagaatcgtcgacccacgcgtccggtggcttagagaagaaaacgcaggttctgcagcctgaggagaagaagactgtggcataccacgaagcaggccatgcggttgccggctggtatctggagcacgcagacccgcttttaaaggtatccatcatcccacgtggcaaaggactaggttatgctcagtatttaccaaaagaacaatacctctataccaaagagcagctcttggataggatgtgtatgactttaggtggtcgagtctctgaagaaatcttctttggaagaattacaactggtgctcaagatgacttgagaaaagtaactcagagtgcatatgcccaaattgttcagtttggcatgaatgaaaaggttgggcaaatctcctttgacctcccacgtcagggggacatggtattggagaaaccttacagtgaagccactgcaagattgatagatgatgaagtacgaatacttattaatgatgcttataaaagaacagtagctcttctcacagaaaagaaagctgacgtggagaaggttgctcttctgttgttagaaaaagaagtattagataagaatgatatggttgaacttttgggccccagaccatttgcggaaaaatctacctatgaagaatttgtggaaggcactggcagcttggatgaggacacctcacttccagaaggccttaaggactggaacaaggagcgggaaaaggagaaagaggagcccccgggtgagaaagttgccaactagaggcccagagggaggccatctcagtctgtccactgtggtttcagccggtgcattatttcagctgtggctttcaaaaaatgggaatgctgcgctgattttagccagccnctggcccagctgaaatgatgggnaaaggagtccttantccttnnacccncanaggtcncagtgggtggcaggngactttccngaggccttgagggaaatgcncnctgtnccatanccncntngggccncccaaactgctggaaagttgancccaaatggcccangctgnaccnggggcnccaatggggncgctgaccgggggcaaggatcttncctgnaccttggcgggggnaagggngctttccttttcccccccctttttccgnttncccc

SEQ ID NO: 393 - DNA, 1341 bp, Homo Sapiens
  misc_feature (788)..(788): n is a, c, g, or t
  misc_feature (853)..(853): n is a, c, g, or t
  misc_feature (886)..(886): n is a, c, g, or t
  misc_feature (895)..(895): n is a, c, g, or t
  misc_feature (905)..(906): n is a, c, g, or t
  misc_feature (911)..(911): n is a, c, g, or t
  misc_feature (926)..(926): n is a, c, g, or t
  misc_feature (935)..(935): n is a, c, g, or t
  misc_feature (944)..(944): n is a, c, g, or t
  misc_feature (948)..(948): n is a, c, g, or t
  misc_feature (951)..(951): n is a, c, g, or t
  misc_feature (955)..(955): n is a, c, g, or t
  misc_feature (972)..(972): n is a, c, g, or t
  misc_feature (1005)..(1005): n is a, c, g, or t
  misc_feature (1010)..(1011): n is a, c, g, or t
  misc_feature (1049)..(1049): n is a, c, g, or t
  misc_feature (1054)..(1054): n is a, c, g, or t
  misc_feature (1068)..(1069): n is a, c, g, or t
  misc_feature (1075)..(1075): n is a, c, g, or t
  misc_feature (1080)..(1080): n is a, c, g, or t
  misc_feature (1089)..(1089): n is a, c, g, or t
  misc_feature (1091)..(1091): n is a, c, g, or t
  misc_feature (1101)..(1101): n is a, c, g, or t
  misc_feature (1110)..(1110): n is a, c, g, or t
  misc_feature (1121)..(1121): n is a, c, g, or t
  misc_feature (1126)..(1126): n is a, c, g, or t
  misc_feature (1158)..(1159): n is a, c, g, or t
  misc_feature (1165)..(1166): n is a, c, g, or t
  misc_feature (1170)..(1170): n is a, c, g, or t
  misc_feature (1178)..(1179): n is a, c, g, or t
  misc_feature (1185)..(1185): n is a, c, g, or t
  misc_feature (1188)..(1188): n is a, c, g, or t
  misc_feature (1192)..(1192): n is a, c, g, or t
  misc_feature (1194)..(1194): n is a, c, g, or t
  misc_feature (1198)..(1198): n is a, c, g, or t
  misc_feature (1207)..(1207): n is a, c, g, or t
  misc_feature (1215)..(1215): n is a, c, g, or t
  misc_feature (1220)..(1220): n is a, c, g, or t
  misc_feature (1227)..(1227): n is a, c, g, or t
  misc_feature (1245)..(1245): n is a, c, g, or t
  misc_feature (1249)..(1249): n is a, c, g, or t
  misc_feature (1256)..(1256): n is a, c, g, or t
  misc_feature (1266)..(1268): n is a, c, g, or t
  misc_feature (1294)..(1294): n is a, c, g, or t
  misc_feature (1308)..(1309): n is a, c, g, or t
  misc_feature (1311)..(1312): n is a, c, g, or t
  misc_feature (1328)..(1328): n is a, c, g, or t
  misc_feature (1336)..(1336): n is a, c, g, or t
gaaatagagagaattactatgagaggatcgcatcaccatcaccatcacggatcctatttaggtgacactatagaatcgtcgacccacgcgtccgcccacgcgtccgagaaggcccagaactctgaaatgagaatgaagagagctcaggagtatgacagtagttttccaaactgggaatttgcccgaatgattaaagaatttcgggctactttggaatgtcatccacttactatgactgatcctatcgaagagcacagaatatgtgtctgtgttaggaaacgcccactgaataagcaagaattggccaagaaagaaattgatgtgatttccattcctagcaagtgtctcctcttggtacatgaacccaagttgaaagtggacttaacaaagtatctggagaaccaagcattctgctttgactttgcatttgatgaaacagcttcgaatgaagttgtctacaggttcacagcaaggccactggtacagacaatctttgaaggtggaaaagcaacttgttttgcatatggccagacaggaagtggcaagacacatactatgggcggagacctctctgggaaagcccagaatgcatccaaagggatctatgccatggcctcccgggacgtcttcctcctgaagaatcaaccctgctaccggaagttgggcctggaagtctatgtgacattcttcgagatctacaatgggaagctgtttgacctgctcaacaagaaggccaagctgcgcgtgctggaggacggcaagcaacaggtgcaagtggtggggctgcnggagcatctggttaactctgctgatgatgtcctcaagatgatcgaactgggccagccgcctgcanaaccctctgggccagacatttgccaactccaanttcctcccngctcccacgnngtggnttccaaattatttcnttcgagctnaaagggganaatngcntggncaagttcctctttgggnaaaaacttggccagggaaaagaaaccaaggccncggannccttccaatggctgaaccggccaaacccgccatggganggggnccaaaaaaatcaannaagaanttccntttaccccntnaaggaagggnctcccgggnccccggggaanaaaanaaagggccccaccccccgcttcccggggaaannaacctnnaccnaggggggnngagggnacncccntntctnggggaaaanctcctagnacttnccggtanggcccccaatcccccccnccanaaacccnccggggaaannncctttaaacccccgaaaaatatcaanacggggcccagganncnngaccccccccaggggnccccgggnaaacc

SEQ ID NO: 394 - DNA, 956 bp, Homo Sapiens
tatgagaggtcgcatcaccatcaccatcacggatcctatttaggtgacactatagaatcgtcgacccacgcgtccgggagagcccggaaccagggccggagcggcgggcggagccgagctgcggggagccgctccgggtgcccccacccccgcgcgcctcagtggtgccggccgagggcagggctcgcggttgcggggctcgcgccgctgtcagtgcggcggggcgcgcgagcggcgccagctcggggcagcggaacccagagaagctgagggggcggtagcggcggcgacggcgacgacgacgactcccgcgcgtgtgcccagcctcttcccgccgcagccgcccttttcctccctcccttacgtccccgagtgcggcagtaccgcctccttcccagccgcgcggcttcctccagacctctcggcgcgggtgagccctattcccagaggcaggtggtgctgaccctgtaacccaaaggaggaaacagctggctaagctcatcattgttactggtgggcactatgtccttgaagcttcaggcaagcaatgtaaccaacaagaatgaccccaagtccatcaactctcgagtcttcattggaaacctcaacacagctctggtgaagaaatcagatgtggagaccatcttctctaagtatggccgtgtggccggctgttctgtgcacaagggctatgcctttgttcagtactccaatgagcgccatgcccgggcagctgtgctgggagagaatgggcgggtgctggccgggcagaccctggacatcaccatggctgggagagcctaagcctgacagacccaaggggctaaagagagcagcatctgccatatacaggctcttcgactaccggggccgttggtcgcccgtgccagtgcccagggcggtccctgtgatgcgaccccgggtcacagtccctttgggtccggcgtgtcaaaact

SEQ ID NO: 395 - DNA, 1170 bp, Homo Sapiens
  misc_feature (934)..(934): n is a, c, g, or t
  misc_feature (954)..(954): n is a, c, g, or t
  misc_feature (968)..(968): n is a, c, g, or t
  misc_feature (976)..(976): n is a, c, g, or t
  misc_feature (979)..(979): n is a, c, g, or t
  misc_feature (997)..(997): n is a, c, g, or t
  misc_feature (1003)..(1003): n is a, c, g, or t
  misc_feature (1020)..(1021): n is a, c, g, or t
  misc_feature (1024)..(1024): n is a, c, g, or t
  misc_feature (1032)..(1032): n is a, c, g, or t
  misc_feature (1047)..(1047): n is a, c, g, or t
  misc_feature (1052)..(1052): n is a, c, g, or t
  misc_feature (1056)..(1056): n is a, c, g, or t
  misc_feature (1061)..(1061): n is a, c, g, or t
  misc_feature (1063)..(1063): n is a, c, g, or t
  misc_feature (1092)..(1092): n is a, c, g, or t
  misc_feature (1097)..(1097): n is a, c, g, or t
  misc_feature (1106)..(1106): n is a, c, g, or t
  misc_feature (1112)..(1112): n is a, c, g, or t
  misc_feature (1115)..(1115): n is a, c, g, or t
  misc_feature (1118)..(1118): n is a, c, g, or t
  misc_feature (1122)..(1122): n is a, c, g, or t
  misc_feature (1129)..(1129): n is a, c, g, or t
  misc_feature (1131)..(1132): n is a, c, g, or t
  misc_feature (1145)..(1145): n is a, c, g, or t
  misc_feature (1154)..(1154): n is a, c, g, or t
  misc_feature (1157)..(1157): n is a, c, g, or t
  misc_feature (1165)..(1166): n is a, c, g, or t
  misc_feature (1168)..(1168): n is a, c, g, or t
tagagaaattactatgagaggatcgcatcaccatcaccatcacggatcctatttaggtgacactatagaatcgtcgacccacgcgtccggcgttggagagaagttttcaacttgggaaccaaccaaacgggagcttgaactgctgaagcacaacccgaaaaggagaaagatcacctcgaactgcaccataggtctgcgtgggctgatcaaccttgggaacacatgcttcatgaactgcatcgtgcaggccctgacccacacgccacttctgcgggacttcttcctgtctgacaggcaccgctgtgagatgcagagccccagctcctgtctggtctgtgagatgtcctcactgtttcaggagttttactctggacaccggtcccctcacatcccgtataagttgctgcacctggtgtggacccacgcgaggcacctagcaggctacgagcagcaggacgcccacgagttcctcatcgcggccctggacgtgctccaccgacactgcaaaggtgatgacaatgggaagaaggccaacaaccccaaccactgcaactgcatcatagaccagatcttcacaggcgggttgcagtcagacgtcacctgccaagtctgccatggagtctccaccaccatcgaccccttctgggacatcagcttggatctccccggctcttccaccccattctggcccctgagcccagggagcgagggcaacgtggtaaacggggaaagccacgtgtcgggaaccaccacgctcacggactgcctgcgacgattcaccagaccagagcacttgggcagcagcgccaagatcaagtgcagcggttgccatagctaccaggagtccacaaagcagctcactatgaagaaactgcccatagtagcctgttttcatctcaaacgatttgaacactcagccaagctgcggcggaanatcaccacgtatgtgtcctncccctggagctganatgacccnttnatggcctccagcaaaaanagcagnatgaatggacagtaccnncanccccgganagtctcaaaaatganaacantatncctgntngctgttgttaaccatcagggaccttgganagggnccctaaacnactttntcnggnacanaaaaacnannggttcaggggaanaatgcctcntcncaaggccnncnta

SEQ ID NO: 396 - DNA, 1142 bp, Homo Sapiens
  misc_feature (1)..(1): n is a, c, g, or t
  misc_feature (1006)..(1006): n is a, c, g, or t
  misc_feature (1009)..(1009): n is a, c, g, or t
  misc_feature (1022)..(1022): n is a, c, g, or t
  misc_feature (1045)..(1045): n is a, c, g, or t
  misc_feature (1054)..(1054): n is a, c, g, or t
  misc_feature (1067)..(1067): n is a, c, g, or t
  misc_feature (1071)..(1071): n is a, c, g, or t
  misc_feature (1088)..(1088): n is a, c, g, or t
  misc_feature (1107)..(1107): n is a, c, g, or t
  misc_feature (1111)..(1112): n is a, c, g, or t
  misc_feature (1116)..(1116): n is a, c, g, or t
  misc_feature (1119)..(1119): n is a, c, g, or t
  misc_feature (1121)..(1121): n is a, c, g, or t
  misc_feature (1128)..(1128): n is a, c, g, or t
  misc_feature (1132)..(1133): n is a, c, g, or t
  misc_feature (1141)..(1141): n is a, c, g, or t
naatagagaaattactatgagaggatcgcatcaccatcaccatcacggatcctatttaggtgacactatagaatcgtcgacccacgcgtccgtgctcttggaccagatcaacagcacctttgttcgctccaaccccagtgtgctccagggcctgcttcgcatcatcccgtacctttcctttggagaggtggagaaaatgcagatcttggtggagcgattcagaccatactgcaactttgataaatatgatgaagatcacagtggtgatgataaagtcttcctggactgcttctgtaaaatagctgctggcatcaagaacaacagcaatgggcaccagctgaaggatctgattctccagaaggggatcacccagaatgcacttgactacatgaaaaagcacatccctagcgccaagaatttggatgccgacatctggaaaaagtttttgtctcgcccagccttgccatttatcctaaggctgcttcggggcctggccatccagcaccctggcacccaggttctgattggaactgattccatcccgaacctgcataagctggagcaggtgtccagtgatgagggcattgggaccttggcagagaacctgctggaagccctgcgggaacaccctgacgtaaacaagaagattgacgcagcccgcagggagacccgggcagagaagaagcgcatggccatggcaatgaggcagaaggccctgggcaccctgggcatgacgacaaatgaaaagggccaggtcgtgaccaagacagcactcctgaagcagatggaagagctgatcgaggagcctggcctcacgtgctgcatctgcagggagggatacaagttccagcccacaaaggtcctgggcatttataccttcacgaaagcgggtagccttggaaggagatggaaaaataagccccggaaacagcagggctacagcaccgtgtccccacttcaacattgtgcactacgactgccatctggctgccgtcaggttggctcnagnccggaaaaatggnaaaatgcccccctgcaaaatgcnacaccaagngcaacgggctccnttcnggttggggacccccagntcctgaatcacttttgccnctgnntggnaananaccaaancttnncctccagna

SEQ ID NO: 397 - DNA, 1169 bp, Homo Sapiens
  misc_feature (821)..(821): n is a, c, g, or t
  misc_feature (930)..(930): n is a, c, g, or t
  misc_feature (948)..(948): n is a, c, g, or t
  misc_feature (956)..(956): n is a, c, g, or t
  misc_feature (962)..(963): n is a, c, g, or t
  misc_feature (973)..(973): n is a, c, g, or t
  misc_feature (1005)..(1006): n is a, c, g, or t
  misc_feature (1010)..(1010): n is a, c, g, or t
  misc_feature (1020)..(1020): n is a, c, g, or t
  misc_feature (1023)..(1023): n is a, c, g, or t
  misc_feature (1028)..(1028): n is a, c, g, or t
  misc_feature (1031)..(1031): n is a, c, g, or t
  misc_feature (1034)..(1034): n is a, c, g, or t
  misc_feature (1044)..(1044): n is a, c, g, or t
  misc_feature (1057)..(1058): n is a, c, g, or t
  misc_feature (1061)..(1061): n is a, c, g, or t
  misc_feature (1087)..(1087): n is a, c, g, or t
  misc_feature (1095)..(1095): n is a, c, g, or t
  misc_feature (1098)..(1098): n is a, c, g, or t
  misc_feature (1116)..(1116): n is a, c, g, or t
  misc_feature (1132)..(1132): n is a, c, g, or t
  misc_feature (1145)..(1145): n is a, c, g, or t
  misc_feature (1153)..(1155): n is a, c, g, or t
  misc_feature (1158)..(1163): n is a, c, g, or t
  misc_feature (1168)..(1169): n is a, c, g, or t
agagaaattactatgagaggatcgcatcaccatcaccatcacggatcctatttaggtgacactatagaatcgtcgacccacgcgtccggccgacgaagagttcagtcccaatgggcctccactaggggaggccataaggagcgccccacagtcatgctgtttccctttaggaatctcggctcaccaacccaggtcatatctaagcctgagagcaaggaagaacatgcgatatacacagcagacctagccatgggcacaagagcagcctccactgggaagtctaagagtccatgccagaccctggggggaagggctctgaaggagaacccagttgacttgcctgccacagagcaaaaggagtgagtggaacagagttgcttcttactaggagcacattctttgcctgccttcccttcatcctatcctctttgcttgctctcacctcaggaattgcttggattgctacatggaccccctgagactatcattattacctcctagggccaggaagccaggtaggtagtctgagtcaggattggatcaacagcctcctctcttggggactctcaagagcctgtgttcatctagaagtagtagtttgattctggtttccctcctacagtgtgtcctccgtctctgtgcagctccgtcattaccataggggacttggttttagactctgatgaggaagaaaatggccagggggaaggaaaggtgagtgggaaggagcagaaagctgggaaaggggatgggtagaacaagactgagaaatccacatgcttcagaattcagagggttcagggaatggtttcggatagtangctctccctgctcccttctctacaggaatctctggaaaactatcagaagacaaagtttgacacctttgatacccactctctgtgaatacctaccccctttctggccacnggtgccatacctgttttnttccttgngactgnnaaaagacagnttctaaaacctttttgaaaaaaactaaaatgnncctntgaactctantcncctgnctnctncagctctgcnagtaatttaatannaantgaaagtggaaattccaggcttggantgccctanctnccctgctaaaaaaattgnaaaccttaaaataaantttggaattgttnaaaaaaannnaannnnnntatann

SEQ ID NO: 398 - DNA, 1179 bp, Homo Sapiens
  misc_feature (790)..(790): n is a, c, g, or t
  misc_feature (835)..(835): n is a, c, g, or t
  misc_feature (848)..(848): n is a, c, g, or t
  misc_feature (940)..(940): n is a, c, g, or t
  misc_feature (980)..(980): n is a, c, g, or t
  misc_feature (989)..(989): n is a, c, g, or t
  misc_feature (992)..(992): n is a, c, g, or t
  misc_feature (1006)..(1006): n is a, c, g, or t
  misc_feature (1010)..(1010): n is a, c, g, or t
  misc_feature (1023)..(1023): n is a, c, g, or t
  misc_feature (1046)..(1046): n is a, c, g, or t
  misc_feature (1051)..(1051): n is a, c, g, or t
  misc_feature (1065)..(1065): n is a, c, g, or t
  misc_feature (1081)..(1081): n is a, c, g, or t
  misc_feature (1083)..(1083): n is a, c, g, or t
  misc_feature (1085)..(1085): n is a, c, g, or t
  misc_feature (1087)..(1087): n is a, c, g, or t
  misc_feature (1091)..(1091): n is a, c, g, or t
  misc_feature (1096)..(1096): n is a, c, g, or t
  misc_feature (1098)..(1098): n is a, c, g, or t
  misc_feature (1108)..(1108): n is a, c, g, or t
  misc_feature (1117)..(1117): n is a, c, g, or t
  misc_feature (1124)..(1124): n is a, c, g, or t
  misc_feature (1129)..(1129): n is a, c, g, or t
  misc_feature (1135)..(1135): n is a, c, g, or t
  misc_feature (1145)..(1145): n is a, c, g, or t
  misc_feature (1147)..(1147): n is a, c, g, or t
  misc_feature (1163)..(1163): n is a, c, g, or t
  misc_feature (1169)..(1170): n is a, c, g, or t
  misc_feature (1172)..(1173): n is a, c, g, or t
  misc_feature (1175)..(1175): n is a, c, g, or t
tagagaaattactatgagaggatcgcatcaccatcaccatcacggatcctatttaggtgacactatagaatcgtcgacccacgcgtccgcccacgcgtccgggtgcttccctgaggctgaggcgcccggcctcccgcccgccgcgctccagatgaagtgtgagcactgcacgcgcaaggaatgtagtaagaaaacaaaaactgatgaccaagagaatgtgtcagccgatgcaccgagtccagcccaggaaaatggagagaagggagaattccacaagttggctgatgccaagatatttttgagcgactgcctggcatgtgacagctgtatgactgcagaggaaggagtccaactttcccagcaaaatgccaaggacttcttccgcgttctgaaccttaacaagaaatgtgatacctcaaagcacaaagtgctggtagtgtctgtgtgtcctcaatctttgccttattttgctgctaaattcaacctcagtgtaactgatgcatccagaagactctgtggtttcctcaaaagtcttggggtgcactatgtatttgatacgacgatagctgcggattttagtatcctggagagtcaaaaagaattcgtgcgtcgctatcgccagcacagtgaggaggaacgcaccctgcccatgctgacctctgcctgtcctggctgggtccgatacgccgagcgggtgctgggtcgccccatcactgcccacctctgcaccgccaagtccccccagcaggtcatgggctctttggtgaaggattatttcgccagacagcanaacctgtctccagaaaagattttccacgtcattgtggccccttgnttatgacaagaanctggaggctcttcaggaaagccttcccccctgctttgcatggctcccggggcgctgactgcgtgttaacatcaggtgaaattgctcaaatantggagcaaggtgacctctcagtgaaaaaatgctgccgtcnacactctgnaantggcttctctgggnaaantcctctggggggnaagacctctcgtcagcctgccanccacntgccaggccagggntgccctgctttttganangncntgtnaaacnantggaatgcantccccaggncccttgncaaancctcancccccctaanantgttgaagggaaaccnttcccnngnntnccgg

SEQ ID NO: 399 - DNA, 1156 bp, Homo Sapiens
  misc_feature (2)..(2): n is a, c, g, or t
  misc_feature (4)..(4): n is a, c, g, or t
  misc_feature (872)..(872): n is a, c, g, or t
  misc_feature (892)..(892): n is a, c, g, or t
  misc_feature (906)..(906): n is a, c, g, or t
  misc_feature (920)..(920): n is a, c, g, or t
  misc_feature (933)..(933): n is a, c, g, or t
  misc_feature (959)..(959): n is a, c, g, or t
  misc_feature (971)..(971): n is a, c, g, or t
  misc_feature (977)..(977): n is a, c, g, or t
  misc_feature (979)..(979): n is a, c, g, or t
  misc_feature (984)..(984): n is a, c, g, or t
  misc_feature (987)..(987): n is a, c, g, or t
  misc_feature (994)..(994): n is a, c, g, or t
  misc_feature (1003)..(1003): n is a, c, g, or t
  misc_feature (1006)..(1006): n is a, c, g, or t
  misc_feature (1009)..(1009): n is a, c, g, or t
  misc_feature (1014)..(1015): n is a, c, g, or t
  misc_feature (1018)..(1018): n is a, c, g, or t
  misc_feature (1021)..(1021): n is a, c, g, or t
  misc_feature (1033)..(1033): n is a, c, g, or t
  misc_feature (1042)..(1042): n is a, c, g, or t
  misc_feature (1052)..(1052): n is a, c, g, or t
  misc_feature (1055)..(1055): n is a, c, g, or t
  misc_feature (1058)..(1058): n is a, c, g, or t
  misc_feature (1061)..(1061): n is a, c, g, or t
  misc_feature (1069)..(1069): n is a, c, g, or t
  misc_feature (1073)..(1073): n is a, c, g, or t
  misc_feature (1085)..(1085): n is a, c, g, or t
  misc_feature (1091)..(1091): n is a, c, g, or t
  misc_feature (1098)..(1098): n is a, c, g, or t
  misc_feature (1100)..(1100): n is a, c, g, or t
  misc_feature (1112)..(1112): n is a, c, g, or t
  misc_feature (1115)..(1115): n is a, c, g, or t
  misc_feature (1120)..(1120): n is a, c, g, or t
  misc_feature (1139)..(1139): n is a, c, g, or t
  misc_feature (1148)..(1148): n is a, c, g, or t
cnantagagaaattactatgagaggatcgcatcaccatcaccatcacggatcctatttaggtgacactatagaatcgtcgacccacgcgtccgtgcaggatcagcaggttgtgatcaattattcaatcgtgaaagggctgaagtacaatcaggccacgccaaccttccaccagtggcgagatgcccgccaggtctacggcttaaactttgcaagtaaagaagaggcaaccacgttctccaatgcaatgctgtttgccctgaacatcatgaattcccaagaaggaggcccctccagccagcgtcaggtgcagaatggcccctctcctgatgagatggacatccagagaagacaagtgatggagcagcaccagcagcagcgtcaggaatctctagaaagaagaacctcggccacagggcccatcctcccaccaggacatccttcatctgcagccagcgcccccgtctcatgtagtgggcctccaccgccccccccacccccagtcccacctccacccactggggctaccccacctcccccacccccactgccagccggaggagcccaggggtccagccacgacgagagctccatgtcaggactggccgctgccatagctggggccaagctgagaagagtccaacggccagaagacgcatctggaggctccagtcccagtgggacctcaaagtccgatgccaaccgggcaagcagcgggggtggcggaggaggcctcatggaggaaatgaacaaactgctggccaagaggagaaaagcagcctcccagtcagacaagccagccgagaagaaggaagatgaaagccaaatggaagatcctagtacctccccctctccggggacccgagcagccagnccagccacctaactcttcanaggctggccggaanccctgggagcggancaactcggtgganaagcctgtgtcctcgattctgtccanaaccccgtctgnggcaananccccnaanctaaaancccctttcntcncancctcnnttntangatgaaacctgntgggaacgngaaatgaaanggnccntgnatgccttncaanttggaccggatnaaacangaaattntnaaggaggggggnganaaaanttcccaaaggggaaggaanaaaatttcnaccccttc

SEQ ID NO: 400 - DNA, 905 bp, Homo Sapiens
  misc_feature (3)..(3): n is a, c, g, or t
  misc_feature (14)..(14): n is a, c, g, or t
  misc_feature (18)..(18): n is a, c, g, or t
  misc_feature (28)..(28): n is a, c, g, or t
  misc_feature (668)..(668): n is a, c, g, or t
  misc_feature (787)..(787): n is a, c, g, or t
  misc_feature (800)..(800): n is a, c, g, or t
  misc_feature (812)..(812): n is a, c, g, or t
  misc_feature (843)..(843): n is a, c, g, or t
  misc_feature (856)..(856): n is a, c, g, or t
  misc_feature (861)..(862): n is a, c, g, or t
  misc_feature (864)..(864): n is a, c, g, or t
  misc_feature (866)..(866): n is a, c, g, or t
  misc_feature (870)..(871): n is a, c, g, or t
  misc_feature (875)..(875): n is a, c, g, or t
  misc_feature (878)..(878): n is a, c, g, or t
  misc_feature (886)..(886): n is a, c, g, or t
  misc_feature (889)..(889): n is a, c, g, or t
  misc_feature (896)..(896): n is a, c, g, or t
  misc_feature (900)..(900): n is a, c, g, or t
ganagagagattantatnagaggatcgnatcaccagtcaccatcacggatcctatttaggtgacactatagaatcgtcgacccacgcgtccgggagcacagaaaatggttctgccccctccacagctcccacagaccagagccggccaccgttggagcacgtggaccagcacctgttcacgctgccgcagggctacggacagtttgctttcggcatcttcgatgacagcttcgagatccccacgttccctcctggggcgcaggctgacgacggcagggaccctgagagccggcgggagagagaccatccgtcccggcaccggtacggcgcccgacagccccgcgcccgcctcaccacgcggcgggccaccggccggcacgaaggcgtccccacgctggaagggatcatccagcagctcgtcaacggcatcatcacgcccgccaccatccccagcctgggcccctggggagtcctgcactcaaaccctatggactacgcctggggggccaacggcctggatgccatcatcacacagctcctcaatcagtttgaaaacacaggccccccaccggcagataaagagaaaatccaggccctccccaccgtccccgtcactgaggagcacgtaggctccgggctcgagtgccctgtgtgcaaggacgactacncgctgggtgagcgtgtgcggcagctgccctgcaaccacctgttccacgacggctgcatcgtgccctggctggagcagcacgacagctgccccgtctgccgaaaaagcctcacgggacanaaacacggccacnaacccccctggnctcactggggtgagctttctcctcctcgtcntcatcgtccttcntccanntngnccannaacnaanaacgccanaancaactcntgancccac

SEQ ID NO: 401 - DNA, 839 bp, Homo Sapiens
  misc_feature (1)..(2): n is a, c, g, or t
  misc_feature (471)..(471): n is a, c, g, or t
  misc_feature (495)..(495): n is a, c, g, or t
  misc_feature (543)..(543): n is a, c, g, or t
  misc_feature (550)..(550): n is a, c, g, or t
  misc_feature (567)..(567): n is a, c, g, or t
  misc_feature (583)..(583): n is a, c, g, or t
  misc_feature (610)..(610): n is a, c, g, or t
  misc_feature (634)..(634): n is a, c, g, or t
  misc_feature (649)..(649): n is a, c, g, or t
  misc_feature (656)..(656): n is a, c, g, or t
  misc_feature (694)..(695): n is a, c, g, or t
  misc_feature (701)..(701): n is a, c, g, or t
  misc_feature (708)..(708): n is a, c, g, or t
  misc_feature (717)..(717): n is a, c, g, or t
  misc_feature (721)..(721): n is a, c, g, or t
  misc_feature (723)..(723): n is a, c, g, or t
  misc_feature (727)..(727): n is a, c, g, or t
  misc_feature (731)..(731): n is a, c, g, or t
  misc_feature (760)..(760): n is a, c, g, or t
  misc_feature (770)..(770): n is a, c, g, or t
  misc_feature (788)..(789): n is a, c, g, or t
  misc_feature (794)..(794): n is a, c, g, or t
  misc_feature (797)..(797): n is a, c, g, or t
  misc_feature (802)..(802): n is a, c, g, or t
  misc_feature (811)..(811): n is a, c, g, or t
  misc_feature (814)..(814): n is a, c, g, or t
  misc_feature (826)..(826): n is a, c, g, or t
  misc_feature (829)..(829): n is a, c, g, or t
  misc_feature (831)..(832): n is a, c, g, or t
  misc_feature (834)..(834): n is a, c, g, or t
  misc_feature (839)..(839): n is a, c, g, or t
nnatagagaaattactatgagaggatcgcatcaccatcaccatcacggatcctatttaggtgacactatagaatcgtcgacccacgcgtccgccgagacccccagtgacgccgcagccatggagagcggcccgcgtgcggagctgggggcgggcgcacccccagctgtggtcgccaggacccccccagagccaagaccttctccagaaggtgacccttcccccccaccaccaccaatgtcagccctggtccccgacactcccccggacacccctcctgccatgaagaatgccactagctctaagcagctcccactggaaccagagagcccctcagggcaggtcgggcctaggccagcccccccgcaggaagagtccccttcctctgaagcaaagagcagaggacccaccccaccagccatgggcccacgggatgccagacctcctcgaaggagcagccagccatctccaanagcagtgccagcctccgacagccntcccaccaagcaagaggtgaagaaggcaggagagagacacaagctggnaaaggancggcgagaagagcgggncaagtacctggcggcnaagaaggcagtgtggctggagaaggangagaaggccaaggcgctgcggganaagcagctccaggancgccggngccggctggaggagcaacgtcttaaagccgagcaagcnntgcagncctgtangaacggcancggnanaagnttcnagaaaaacaatggatcgctatgaaagcanccattccaanggtcagtgaaaaaagacnntgggncgnaattncggcaacancgnctggtcctgggnagngnncncttgn

SEQ ID NO: 402 - DNA, 1139 bp, Homo Sapiens
  misc_feature (899)..(899): n is a, c, g, or t
  misc_feature (931)..(931): n is a, c, g, or t
  misc_feature (967)..(967): n is a, c, g, or t
  misc_feature (982)..(982): n is a, c, g, or t
  misc_feature (992)..(992): n is a, c, g, or t
  misc_feature (1011)..(1011): n is a, c, g, or t
  misc_feature (1017)..(1017): n is a, c, g, or t
  misc_feature (1019)..(1019): n is a, c, g, or t
  misc_feature (1027)..(1027): n is a, c, g, or t
  misc_feature (1044)..(1044): n is a, c, g, or t
  misc_feature (1057)..(1057): n is a, c, g, or t
  misc_feature (1068)..(1068): n is a, c, g, or t
  misc_feature (1072)..(1072): n is a, c, g, or t
  misc_feature (1076)..(1076): n is a, c, g, or t
  misc_feature (1082)..(1082): n is a, c, g, or t
  misc_feature (1093)..(1093): n is a, c, g, or t
  misc_feature (1095)..(1096): n is a, c, g, or t
  misc_feature (1100)..(1100): n is a, c, g, or t
  misc_feature (1108)..(1108): n is a, c, g, or t
  misc_feature (1110)..(1113): n is a, c, g, or t
  misc_feature (1117)..(1117): n is a, c, g, or t
  misc_feature (1121)..(1121): n is a, c, g, or t
  misc_feature (1124)..(1124): n is a, c, g, or t
  misc_feature (1130)..(1130): n is a, c, g, or t
  misc_feature (1135)..(1135): n is a, c, g, or t
tagagaaattactatgagaggatcgcatcaccatcaccatcacggatcctatttaggtgacactatagaatcgtcgacccacgcgtccgaacagaaagaagagtgtacaatccgtggccggagcctgatccagattagcatccaggaggacccctggaacctccccaactccatcaagaccctggtggacaacattcagagatatgtggaagatgggaagaaccagctgctcctggccttgctgaagtgcacagacacggagctgcagctgcgcagagacgcgatcttctgccaggccctggtggccgccgtgtgcaccttctccgagcagctgctggcggccctgggctaccgctacaacaacaatggcgagtacgaggagagcagccgcgacgccagccgcaagtggctggagcaggtggcggccacgggcgtcctgctgcactgccagtccctgctctcgccagccacagtgaaggaggaacggaccatgctggaggacatctgggtgacgctgtcagagctggacaatgtcaccttctcctttaagcagctggacgagaactatgtggccaacaccaacgtcttctaccacattgagggcagccggcaggcgctgaaggtcatcttctacctcgacagctaccacttctccaagctgccctcccgcctggagggtggggccagcctgaggctgcacacagcgctgttcacgaaagtgctggagaacgtggaggggctgccttctccaggcagccaggccgcggaggatttgcagcaggacatcaacgcgcagtccctggagaaagttcagcagtattaccgcaaactcagggcattttacctggagcggtctaacctgcccacggatgccagcaccacggcggtaaagatagacnagctgatccgccccatcaatgccctggatganctctgccgcctcatgaagtcctttgtccacccaaancctggtgctgctggnattgtgggcnccggcctcatcccatctcntcgaantntgctaccncctgggggcctgccaanggtcatgtgtggnaaaggcatgcnaaanaacncctgancgtgtccctgnannaggngccatttngnnnngaancccnggnttgctnccaantgct

SEQ ID NO: 403 - DNA, 828 bp, Homo Sapiens
ctatgagaggatcgcatcaccatcaccatcacggatcctatttaggtgacactatagaatcgtcgacccacgcgtccgagcagggcctgagcactgccttgtcagtggagaagaccagcaagcgtggcggcaagatcatcgtgggcgacgccacagagaaagatgcatccaagaagtcagattcaaatccgctgactgaaatacttaagtgtcctactaaagtggtcttactaaggaacatggttggtgcgggagaggtggatgaagacttggaagttgaaaccaaggaagaatgtgaaaaatatggcaaagttggaaaatgtgtgatatttgaaattcctggtgcccctgatgatgaagcagtacggatatttttagaatttgagagagttgaatcagcaattaaagcggttgttgacttgaatgggaggtattttggtggacgggtggtaaaagcatgtttctacaatttggacaaattcagggtcttggatttggcagaacaagtttgattttaagaactagagcacgagtcatctccggtgatccttaaatgaactgcaggctgagaaaagaaggaaaaaggtcacagcctccatggctgttgcataccaagactcttggaaggacttctaagatatatgttgattgatcccttttttattttgtggttttttaatatagtataaaaatccttttaaaaaaacaacaatctgtgtgcctctctggttgtttctcttttttattattactcctgagttgatgacattttttgttagatttcatggtaattctcaagtgcttcaatgatgcagcatttcttgcact

SEQ ID NO: 404 - DNA, 1116 bp, Homo Sapiens
  misc_feature (1)..(1): n is a, c, g, or t
  misc_feature (783)..(783): n is a, c, g, or t
  misc_feature (832)..(832): n is a, c, g, or t
  misc_feature (834)..(834): n is a, c, g, or t
  misc_feature (845)..(845): n is a, c, g, or t
  misc_feature (847)..(847): n is a, c, g, or t
  misc_feature (873)..(873): n is a, c, g, or t
  misc_feature (914)..(914): n is a, c, g, or t
  misc_feature (919)..(919): n is a, c, g, or t
  misc_feature (947)..(947): n is a, c, g, or t
  misc_feature (949)..(949): n is a, c, g, or t
  misc_feature (988)..(988): n is a, c, g, or t
  misc_feature (992)..(992): n is a, c, g, or t
  misc_feature (997)..(997): n is a, c, g, or t
  misc_feature (1004)..(1004): n is a, c, g, or t
  misc_feature (1008)..(1008): n is a, c, g, or t
  misc_feature (1019)..(1019): n is a, c, g, or t
  misc_feature (1035)..(1035): n is a, c, g, or t
  misc_feature (1040)..(1040): n is a, c, g, or t
  misc_feature (1042)..(1043): n is a, c, g, or t
  misc_feature (1045)..(1045): n is a, c, g, or t
  misc_feature (1049)..(1049): n is a, c, g, or t
  misc_feature (1053)..(1053): n is a, c, g, or t
  misc_feature (1063)..(1063): n is a, c, g, or t
  misc_feature (1070)..(1070): n is a, c, g, or t
  misc_feature (1073)..(1073): n is a, c, g, or t
  misc_feature (1085)..(1086): n is a, c, g, or t
  misc_feature (1089)..(1089): n is a, c, g, or t
  misc_feature (1091)..(1091): n is a, c, g, or t
  misc_feature (1100)..(1100): n is a, c, g, or t
  misc_feature (1107)..(1108): n is a, c, g, or t
  misc_feature (1112)..(1112): n is a, c, g, or t
nttagagaaattactatgagaggatcgcatcaccatcaccatcacggatcctatttaggtgacactatagaatcgtcgacccacgcgtccggctggatccgcgcacacccagtggcggcggatgggcggccggggcggccggggcggccggtcctgagcgcggcccgggctgtcagggctggctgctggcgggatggacaccctggaggaggtgacttgggccaatgggagcacagcgctacccccacccctggcaccaaacatcagtgtgcctcatcgctgcctgctgctgctctacgaagacattggcacctccagggtccggtactgggacctcttgctgctcatccccaatgtgctcttcctcatcttcctgctctggaagcttccatctgctcgggcgaagatccgcatcacctccagccccatttttatcaccttctacatcctggtgtttgtggtggcgctggtgggcattgcccgggccgtggtatccatgacggtgagcacctcgaacgctgcaactgttgctgataagatcctgtgggagatcacccgcttcttcctgctggccatcgagctgagtgtgatcatcctgggcctggcctttggccacctggagagtaagtccagcatcaagcgggtgctggccatcaccacagtgctgtccctggcctactctgtcacccaggggaccctggagatcctgtaccctgatgcccatctctcagctgaggactttaatatctatggccatgggggccgccagttctggctggtcanctcctgcttcttcttcctggtctactctctggtggtcatccttcccaanancccgctgaagnancgcatctccctgccttctcggaagancttctacgtgtatgcgggcatcctggcactgctcaacctantgcangggctggggaatgtgctgctgtgcttcnanatcatcaaggggctctgctgtgtaaatgcaaaaaccttnctgnaattnaactttnttcnctccgctcatntaagtggctttcctcnggggntnntncggntcgnaacccaaaancttcttntcntaaaatgccaanntgnanaaaaaaaanaaccaanntaanccta

SEQ ID NO: 405 - DNA, 1210 bp, Homo Sapiens
  misc_feature (855)..(855): n is a, c, g, or t
  misc_feature (910)..(910): n is a, c, g, or t
  misc_feature (915)..(915): n is a, c, g, or t
  misc_feature (924)..(924): n is a, c, g, or t
  misc_feature (945)..(945): n is a, c, g, or t
  misc_feature (964)..(965): n is a, c, g, or t
  misc_feature (968)..(968): n is a, c, g, or t
  misc_feature (975)..(975): n is a, c, g, or t
  misc_feature (992)..(992): n is a, c, g, or t
  misc_feature (1011)..(1011): n is a, c, g, or t
  misc_feature (1034)..(1035): n is a, c, g, or t
  misc_feature (1040)..(1040): n is a, c, g, or t
  misc_feature (1042)..(1042): n is a, c, g, or t
  misc_feature (1053)..(1053): n is a, c, g, or t
  misc_feature (1058)..(1058): n is a, c, g, or t
  misc_feature (1068)..(1069): n is a, c, g, or t
  misc_feature (1071)..(1071): n is a, c, g, or t
  misc_feature (1090)..(1090): n is a, c, g, or t
  misc_feature (1094)..(1094): n is a, c, g, or t
  misc_feature (1100)..(1100): n is a, c, g, or t
  misc_feature (1102)..(1102): n is a, c, g, or t
  misc_feature (1105)..(1106): n is a, c, g, or t
  misc_feature (1119)..(1119): n is a, c, g, or t
  misc_feature (1123)..(1123): n is a, c, g, or t
  misc_feature (1125)..(1125): n is a, c, g, or t
  misc_feature (1137)..(1137): n is a, c, g, or t
  misc_feature (1141)..(1141): n is a, c, g, or t
  misc_feature (1144)..(1144): n is a, c, g, or t
  misc_feature (1160)..(1160): n is a, c, g, or t
  misc_feature (1163)..(1163): n is a, c, g, or t
  misc_feature (1166)..(1166): n is a, c, g, or t
  misc_feature (1174)..(1174): n is a, c, g, or t
  misc_feature (1176)..(1176): n is a, c, g, or t
  misc_feature (1178)..(1178): n is a, c, g, or t
  misc_feature (1189)..(1189): n is a, c, g, or t
  misc_feature (1197)..(1197): n is a, c, g, or t
  misc_feature (1201)..(1202): n is a, c, g, or t
  misc_feature (1209)..(1209): n is a, c, g, or t
atagagagattactatgagaggatcgcatcaccatcaccatcacggatcctatttaggtgacactatagaatcgtcgacccacgcgtccggcgggaagatggcggaacaggctaccaagtccgtgctgtttgtgtgtctgggtaacatttgtcgatcacccattgcagaagcagttttcaggaaacttgtaaccgatcaaaacatctcagagaattgggtcattgatagcggtgctgtttctgactggaacgtgggccggtccccagacccaagagctgtgagctgcctaagaaatcatggcattcacacagcccataaagcaagacagattaccaaagaagattttgccacatttgattatatactatgtatggatgaaagcaatctgagagatttgaatagaaaaagtaatcgagttaaaacctgcaaagctaaaattgaactacttgggagctatgatccacaaaaacaacttattattgaagatccctattatgggaatgactctgactttgagacggtgtaccagcagtgtgtcaggtgctgcagagcgttcttggagaaggcccactgaggcaggttcgtgccctgctgcggccagcctgactagaccccaccctgaggtcctgcatttctcagtcggtgtgtaatcacgttccagggcccaaagcccagctctttgttcagttgacttactgtttcttaccttaaaaagtaattgtagatggaaatcagttgtgtttggcaggagaatcaataaaaatctttgattcagacagcttatggggtattttaagcattcttagactagttgaacatctcactttgccccagttacaaaaatagtagaccangcaacataaaaacaatgaaggaaaacctcacttgaaggcccaggtcaacatctancctgntgagactanataatcgagtctacctcttcngtagtttgtgtggatggcnnganggcaggngccctctgctccccagngctacctctctcttcccanggccttttggggatggacagtannccccncngtaggaccccnagtcnaaattaaaanngntttaatttccacccccccntagngccccntngtnnttgaaaaaagggnaaananaaactttttggnatcngcngtggcccctcaaaccnccngantttggcgngntncctccggaggngccccccntggnncccctgna

SEQ ID NO: 406 - DNA, 1342 bp, Homo Sapiens
  misc_feature (1)..(1): n is a, c, g, or t
  misc_feature (782)..(782): n is a, c, g, or t
  misc_feature (866)..(866): n is a, c, g, or t
  misc_feature (885)..(885): n is a, c, g, or t
  misc_feature (932)..(932): n is a, c, g, or t
  misc_feature (962)..(962): n is a, c, g, or t
  misc_feature (984)..(984): n is a, c, g, or t
  misc_feature (986)..(986): n is a, c, g, or t
  misc_feature (990)..(990): n is a, c, g, or t
  misc_feature (997)..(997): n is a, c, g, or t
  misc_feature (1002)..(1002): n is a, c, g, or t
  misc_feature (1005)..(1005): n is a, c, g, or t
  misc_feature (1018)..(1018): n is a, c, g, or t
  misc_feature (1026)..(1026): n is a, c, g, or t
  misc_feature (1045)..(1045): n is a, c, g, or t
  misc_feature (1057)..(1057): n is a, c, g, or t
  misc_feature (1074)..(1074): n is a, c, g, or t
  misc_feature (1076)..(1076): n is a, c, g, or t
  misc_feature (1078)..(1078): n is a, c, g, or t
  misc_feature (1081)..(1081): n is a, c, g, or t
  misc_feature (1100)..(1100): n is a, c, g, or t
  misc_feature (1102)..(1103): n is a, c, g, or t
  misc_feature (1110)..(1110): n is a, c, g, or t
  misc_feature (1131)..(1131): n is a, c, g, or t
  misc_feature (1133)..(1133): n is a, c, g, or t
  misc_feature (1139)..(1139): n is a, c, g, or t
  misc_feature (1155)..(1155): n is a, c, g, or t
  misc_feature (1162)..(1162): n is a, c, g, or t
  misc_feature (1171)..(1171): n is a, c, g, or t
  misc_feature (1173)..(1173): n is a, c, g, or t
  misc_feature (1180)..(1180): n is a, c, g, or t
  misc_feature (1182)..(1182): n is a, c, g, or t
  misc_feature (1190)..(1190): n is a, c, g, or t
  misc_feature (1200)..(1200): n is a, c, g, or t
  misc_feature (1203)..(1204): n is a, c, g, or t
  misc_feature (1211)..(1211): n is a, c, g, or t
  misc_feature (1222)..(1222): n is a, c, g, or t
  misc_feature (1225)..(1225): n is a, c, g, or t
  misc_feature (1229)..(1230): n is a, c, g, or t
  misc_feature (1234)..(1234): n is a, c, g, or t
  misc_feature (1243)..(1243): n is a, c, g, or t
  misc_feature (1249)..(1251): n is a, c, g, or t
  misc_feature (1256)..(1256): n is a, c, g, or t
  misc_feature (1262)..(1262): n is a, c, g, or t
  misc_feature (1265)..(1265): n is a, c, g, or t
  misc_feature (1269)..(1269): n is a, c, g, or t
  misc_feature (1277)..(1277): n is a, c, g, or t
  misc_feature (1286)..(1286): n is a, c, g, or t
  misc_feature (1299)..(1299): n is a, c, g, or t
  misc_feature (1301)..(1301): n is a, c, g, or t
  misc_feature (1312)..(1312): n is a, c, g, or t
  misc_feature (1315)..(1315): n is a, c, g, or t
  misc_feature (1320)..(1320): n is a, c, g, or t
ntatagagaaattactatggagaggatcgcatcaccatcaccatcacggatcctatttaggtgacactatagaatcgtcgacccacgcgtccgcggccgtcctcattgagaccctcgtcaccctgggtgctgaggtgcagtggtccagctgcaacatcttctccacccaggaccatgcggcggctgccattgccaaggctggcattccggtgtatgcctggaagggcgaaacggacgaggagtacctgtggtgcattgagcagaccctgtacttcaaggacgggcccctcaacatgattctggacgacgggggcgacctcaccaacctcatccacaccaagtacccgcagcttctgccaggcatccgaggcatctctgaggagaccacgactggggtccacaacctctacaagatgatggccaatgggatcctcaaggtgcctgccatcaatgtcaatgactccgtcaccaagagcaagtttgacaacctctatggctgccgggagtccctcatagatggcatcaagcgggccacagatgtgatgattgccggcaaggtagcggtggtagcaggctatggtgatgtgggcaagggctgtgcccaggccctgcggggtttcggagcccgcgtcatcatcaccgagattgaccccatcaacgcactgcaggctgccatggagggctatgaggtgaccaccatggatgaggcctgtcaggagggcaacatctttgtcaccaccacaggctgtattgacatcatccttggccggcactttgagcanatgaaggatgatgccattgtgtgtaacattggacactttgacgtggagatcgatgtcaagtggctcaacgagaacgccgtgganaaggtgaacatcaagcccncaggtggaccggtatcggttgaaaaatgggcgccgcatcatcctgcntggccgaagggtcggctggtcaacctgggnttgtgccatgggccacccccancntccntgatgantaacntcnttcccccaaccangtgatggncccaaaatcaagcttttgnacccatcccaanaaataccccgtttgggntncnttncctgcccaaaaactgaaanannaatggcnttaaacccccctgggcaaacntnatgttnaatttaacaaactaantaaaaanaagccccananctgggcntnttctgganggcccttttnaannggaaaantacccttatanaancagnnccangggtttttncccccnnnaaaanaaaaanggntttntttaaggnaaaaaaaanttttttttaattntnaaaaaccggtnaanggggnctttcttaaccccataaaaggg

SEQ ID NO: 407 - DNA, 944 bp, Homo Sapiens
atgagaggtcgcatcaccatcaccatcacggatcctatttaggtgacactatagaatcgtcgacccacgcgtccggcttcaaccacttcagcttgaccctcaacaccaaccatgggcatatcctggtggattactccaagaacctggtgacggaggacgtgatgcggatgctggtggacttggccaagtccaggggcgtggaggccgcccgggagcggatgttcaatggtgagaagatcaactacaccgagggtcgagccgtgctgcacgtggctctgcggaaccggtcaaacacacccatcctggtagacggcaaggatgtgatgccagaggtcaacaaggttctggacaagatgaagtctttctgccagcgtgtccggagcggtgactggaaggggtacacaggcaagaccatcacggacgtcatcaacattggcattggcggctccgacctgggacccctcatggtgactgaagcccttaagccatactcttcaggaggtccccgcgtctggtatgtctccaacattgatggaactcacattgccaaaaccctggcccagctgaaccccgagtcctccctgttcatcattgcctccaagacctttactacccaggagaccatcacgaatgcagagacggcgaaggagtggtttctccaggcggccaaggatccttctgcagtggcgaagcactttgttgccctgtctactaacacaaccaaagtgaaggagtttggaattgaccctcaaaacatgttcgagttctgggattgggtgggaggacgctactcgctgtggtcggccatcggactctccattgccctgcacgtgggttttgacaacttcgagcagctgctctcgggggctcactggatggaccagcacttccgcacgacgcccctggagaagaacgcccccgtcttgctggccctgctgggtatc

SEQ ID NO: 408 - DNA, 1179 bp, Homo Sapiens
  misc_feature (4)..(4): n is a, c, g, or t
  misc_feature (965)..(965): n is a, c, g, or t
  misc_feature (975)..(975): n is a, c, g, or t
  misc_feature (987)..(987): n is a, c, g, or t
  misc_feature (1006)..(1007): n is a, c, g, or t
  misc_feature (1018)..(1018): n is a, c, g, or t
  misc_feature (1021)..(1021): n is a, c, g, or t
  misc_feature (1035)..(1035): n is a, c, g, or t
  misc_feature (1046)..(1046): n is a, c, g, or t
  misc_feature (1060)..(1060): n is a, c, g, or t
  misc_feature (1067)..(1067): n is a, c, g, or t
  misc_feature (1086)..(1086): n is a, c, g, or t
  misc_feature (1113)..(1113): n is a, c, g, or t
  misc_feature (1143)..(1143): n is a, c, g, or t
  misc_feature (1151)..(1151): n is a, c, g, or t
  misc_feature (1156)..(1156): n is a, c, g, or t
  misc_feature (1165)..(1166): n is a, c, g, or t
  misc_feature (1169)..(1169): n is a, c, g, or t
  misc_feature (1176)..(1176): n is a, c, g, or t
aaantagagaaattactatgagaggatcgcatcaccatcaccatcacggatcctatttaggtgacactatagaatcgtcgacccacgcgtccgcccacgcgtccggtctgttgtgtcttgttgcgggcaccgcagtcgccgtgaagatggcgtctaccagccgtttggatgctcttccaagagtcacatgtccaaaccatccagatgcgattttagtggaggactacagagccggtgatatgatctgtcctgaatgtggcttggttgtaggtgaccgggttattgatgtgggatctgaatggcgaactttcagcaatgacaaagcaacaaaagatccatctcgagttggagattctcagaatcctcttctgagtgatggagatttgtctaccatgattggcaagggcacaggagctgcaagttttgacgaatttggcaattctaagtaccagaatcggagaacaatgagcagttctgatcgggcaatgatgaatgcattcaaagaaatcactaccatggcagacagaatcaatctacctcgaaatatagttgatcgaacaaataatttattcaagcaagtatatgaacagaagagcctgaagggaagagctaatgatgctatagcttctgcttgtctctatattgcctgtagacaagaaggggttcctaggacatttaaagaaatatgtgccgtatcacgaatttctaagaaagaaattggtcggtgttttaaacttattttgaaagcgctagaaaccagtgtggatttgattacaactggggacttcatgtccaggttctgttccaacctttgtcttcctaaacaagtacagatggcagctacacatatagcccgtaaagctgtggaattggacttggttcctgggaagaagccccatctctgtggcagcggcagctatttacatgggcctcccaggcatcagctgaaaagaggacccaaaaanaaaattgganaaattgctgggngttgctgatgttacaatcnnaacagtccctntanactgatctatcccncgagcccccanaatctgtttcctanaaacttncaaatttgacccccccggnggaaaaactaccccacctttaattggnggcccctaacgccaattcttgaaaacaaantttggccngttgnaaaaacccnnaanaaaagcnggg

SEQ ID NO: 409 - DNA, 1273 bp, Homo Sapiens
  misc_feature (840)..(840): n is a, c, g, or t
  misc_feature (913)..(913): n is a, c, g, or t
  misc_feature (956)..(956): n is a, c, g, or t
  misc_feature (980)..(980): n is a, c, g, or t
  misc_feature (1009)..(1009): n is a, c, g, or t
  misc_feature (1029)..(1029): n is a, c, g, or t
  misc_feature (1036)..(1036): n is a, c, g, or t
  misc_feature (1058)..(1058): n is a, c, g, or t
  misc_feature (1063)..(1064): n is a, c, g, or t
  misc_feature (1067)..(1067): n is a, c, g, or t
  misc_feature (1071)..(1071): n is a, c, g, or t
  misc_feature (1082)..(1082): n is a, c, g, or t
  misc_feature (1088)..(1088): n is a, c, g, or t
  misc_feature (1097)..(1097): n is a, c, g, or t
  misc_feature (1109)..(1109): n is a, c, g, or t
  misc_feature (1129)..(1129): n is a, c, g, or t
  misc_feature (1151)..(1151): n is a, c, g, or t
  misc_feature (1153)..(1153): n is a, c, g, or t
  misc_feature (1158)..(1158): n is a, c, g, or t
  misc_feature (1163)..(1163): n is a, c, g, or t
  misc_feature (1174)..(1174): n is a, c, g, or t
  misc_feature (1177)..(1178): n is a, c, g, or t
  misc_feature (1188)..(1188): n is a, c, g, or t
  misc_feature (1190)..(1190): n is a, c, g, or t
  misc_feature (1199)..(1199): n is a, c, g, or t
  misc_feature (1202)..(1202): n is a, c, g, or t
  misc_feature (1211)..(1211): n is a, c, g, or t
  misc_feature (1224)..(1224): n is a, c, g, or t
  misc_feature (1227)..(1228): n is a, c, g, or t
  misc_feature (1232)..(1232): n is a, c, g, or t
  misc_feature (1236)..(1236): n is a, c, g, or t
  misc_feature (1242)..(1242): n is a, c, g, or t
  misc_feature (1246)..(1247): n is a, c, g, or t
  misc_feature (1252)..(1252): n is a, c, g, or t
  misc_feature (1266)..(1266): n is a, c, g, or t
  misc_feature (1269)..(1269): n is a, c, g, or t
  misc_feature (1273)..(1273): n is a, c, g, or t
tagagaaattactatgagaggatcgcatcaccatcaccatcacggatcctatttaggtgacactatagaatcgtcgacccacgcgtccgcgctgactggaggctggcggacaggcgacagcgacctgcggcaggaccagaggagcgagagcagcaagaaccacacccagcagcaatgtcagcggaagtggaaacctcagagggggtagacgagtcagaaaaaaagaactctggggccctagaaaaggagaaccaaatgagaatggctgacctctcggagctcctgaaggaagggaccaaggaagcacacgaccgggcagaaaacacccagtttgtcaaggacttcttgaaaggcaacattaagaaggagctgtttaagctggccaccacggcactttacttcacatactcagccctcgaggaggaaatggagcgcaacaaggaccatccagcctttgcccctttgtacttccccatggagctgcaccggaaggaggcgctgaccaaggacatggagtatttctttggtgaaaactgggaggagcaggtgcagtgccccaaggctgcccagaagtacgtggagcggatccactacatagggcagaacgagccggagctactggtggcccatgcatacacccgctacatgggggatctctcggggggccaggtgctgaagaaggtggcccagcgagcactgaaactccccagcacaggggaagggacccagttctacctgtttgagaatgtggacaatgcccagcagttcaagcagctctaccgggccaggatgaacgccctggacctgaacatgaagaccaaagagaggatcgtggaggangccaacaaggcttttgagtataacatgcagatattcaatgaactggaccaggccggctccacactggccaganagaccttggaggatgggttccctgtacacgatgggaaaagganacatgcgtaaatgccctttctacnctgctgaacaaaacaaaggtgccctgganggcagcagctgtcccttccnaaagctntggctgtgctgaagaaacccancctcnnttnatcntggcccctggntggccntactgctgnatctggcctggnactacatgtgaagccccctnatgccccccggtacctcctccnantgacnatggnctacccttttnccnncctgaataantncccctcggnganttttaaaangggggtttaaaanggnnccanaaanccaatnttannccttnctggaaaatccttnttnggcn

SEQ ID NO: 410 - DNA, 1175 bp, Homo Sapiens
  misc_feature (1)..(1): n is a, c, g, or t
  misc_feature (803)..(803): n is a, c, g, or t
  misc_feature (818)..(818): n is a, c, g, or t
  misc_feature (834)..(834): n is a, c, g, or t
  misc_feature (841)..(841): n is a, c, g, or t
  misc_feature (850)..(850): n is a, c, g, or t
  misc_feature (889)..(889): n is a, c, g, or t
  misc_feature (901)..(901): n is a, c, g, or t
  misc_feature (915)..(915): n is a, c, g, or t
  misc_feature (953)..(953): n is a, c, g, or t
  misc_feature (986)..(986): n is a, c, g, or t
  misc_feature (990)..(990): n is a, c, g, or t
  misc_feature (1017)..(1017): n is a, c, g, or t
  misc_feature (1036)..(1036): n is a, c, g, or t
  misc_feature (1039)..(1039): n is a, c, g, or t
  misc_feature (1055)..(1055): n is a, c, g, or t
  misc_feature (1057)..(1057): n is a, c, g, or t
  misc_feature (1066)..(1066): n is a, c, g, or t
  misc_feature (1082)..(1082): n is a, c, g, or t
  misc_feature (1086)..(1086): n is a, c, g, or t
  misc_feature (1093)..(1093): n is a, c, g, or t
  misc_feature (1104)..(1104): n is a, c, g, or t
  misc_feature (1113)..(1115): n is a, c, g, or t
  misc_feature (1117)..(1118): n is a, c, g, or t
  misc_feature (1137)..(1137): n is a, c, g, or t
  misc_feature (1144)..(1144): n is a, c, g, or t
  misc_feature (1148)..(1150): n is a, c, g, or t
  misc_feature (1152)..(1153): n is a, c, g, or t
  misc_feature (1157)..(1157): n is a, c, g, or t
  misc_feature (1159)..(1159): n is a, c, g, or t
  misc_feature (1163)..(1163): n is a, c, g, or t
naaatagagaaattactatgagaggatcgcatcaccatcaccatcacggatcctatttaggtgacactatagaatcgtcgacccacgcgtccgcccacgcgtccgcccacgcgtccgagctggggaaccccatgaagagaggtgcccaggtcaccttctacctcatccttagcacctccgggatcagcattgagaccacggaactggaggtagagctgctgttggccacgatcagtgagcaggagctgcatccagtctctgcacgagcccgtgtcttcattgagctgccactgtccattgcaggaatggccattccccagcaactcttcttctctggtgtggtgaggggcgagagagccatgcagtctgagcgggatgtgggcagcaaggtcaagtatgaggtcacggtttccaaccaaggccagtcgctcagaaccctgggctctgccttcctcaacatcatgtggcctcatgagattgccaatgggaagtggttgctgtacccaatgcaggttgagctggagggcgggcaggggcctgggcagaaagggctttgctctcccaggcccaacatcctccacctggatgtggacagtagggataggaggcggcgggagctggagccacctgagcagcaggagcctggtgagcggcaggagcccagcatgtcctggtggccagtgtcctctgctgagaagaagaaaaacatcaccctggactgcgcccggggcacggccaactgtgtggtgttcagctgcccactctacagctttgaccgcgcggctgtgctgcatgtctggggnccgtctctggaacancacctttctggaggantactcanctgtgaaantccctggaagtgattgtccgggccaacatcacagtgaantcctccataaanaacttgatgctccnagatgcctccacagtgatcccagtgatggtatacttgnaacccatggctgtgggggccaaaaagaatgccntggngggtcatcctcctggctgtactggctngggctgctggggctaacantgntggggctgcctcctgngnaaaaatggnatttttcaaacgggcnaaanccccccnaaggcccccgngcccccaannncnngggggggaaaaattccccnggaaaanccannncnntttnangggngaaaaaaaaggg

SEQ ID NO: 411 - DNA, 1138 bp, Homo Sapiens
  misc_feature (897)..(897): n is a, c, g, or t
  misc_feature (912)..(912): n is a, c, g, or t
  misc_feature (923)..(923): n is a, c, g, or t
  misc_feature (942)..(942): n is a, c, g, or t
  misc_feature (954)..(954): n is a, c, g, or t
  misc_feature (975)..(975): n is a, c, g, or t
  misc_feature (982)..(982): n is a, c, g, or t
  misc_feature (986)..(986): n is a, c, g, or t
  misc_feature (998)..(998): n is a, c, g, or t
  misc_feature (1003)..(1003): n is a, c, g, or t
  misc_feature (1007)..(1007): n is a, c, g, or t
  misc_feature (1012)..(1012): n is a, c, g, or t
  misc_feature (1014)..(1014): n is a, c, g, or t
  misc_feature (1016)..(1016): n is a, c, g, or t
  misc_feature (1020)..(1020): n is a, c, g, or t
  misc_feature (1025)..(1025): n is a, c, g, or t
  misc_feature (1033)..(1033): n is a, c, g, or t
  misc_feature (1046)..(1046): n is a, c, g, or t
  misc_feature (1049)..(1049): n is a, c, g, or t
  misc_feature (1058)..(1059): n is a, c, g, or t
  misc_feature (1063)..(1063): n is a, c, g, or t
  misc_feature (1068)..(1068): n is a, c, g, or t
  misc_feature (1099)..(1099): n is a, c, g, or t
  misc_feature (1104)..(1104): n is a, c, g, or t
  misc_feature (1114)..(1114): n is a, c, g, or t
  misc_feature (1132)..(1132): n is a, c, g, or t
  misc_feature (1135)..(1135): n is a, c, g, or t
caatagagaaattactatgagaggatcgcatcaccatcaccatcacggatcctatttaggtgacactatagaatcgtcgacccacgcgtccgcggacgcgtggggttcgagccgccgcccgaaaggccgggccgtcgtcttaggaggagtcgccgccgccgccacctccgccatggagctgatcaccattctcgagaagaccgtgtctcccgatcggctggagctggaagcggcgcagaagttcctggagcgtgcggccgtggagaacctgcccactttccttgtggaactgtccagagtgctggcaaatccaggaaacagtcaggttgccagagttgcagctggtctacaaatcaagaactctttgacatctaaagatccagatatcaaggcacaatatcagcagaggtggcttgctattgatgctaatgctcgacgagaagtcaagaactatgttttgcagacattgggtacagaaacttaccggcctagttctgcctcacagtgtgtggctggtattgcttgtgcagagatcccagtaaaccagtggccagaactcattcctcagctggtggccaatgtcacaaaccccaacagcacagagcacatgaaggagtcgacattggaagccatcggttatatttgccaagatatagacccagagcagctacaagataaatccaatgagattctgactgccataatccaggggatgaggaaagaagagcctagtaataatgtgaagctagctgctacgaatgcactcctgaactcattggagttcaccaaagcaaactttgataaagagtctgaaaggcactttattatgcaggtggtctgtgaagccacacagtgtccagatacgagggtacgaagtggctgcttttacagaatctnggtgaagaataatgntccttatattnatcagtacattgaaaacantatattggggtncctgctctttttttgcaatcncaattcnaaancaattgaaaaantgganattngaagnangnggcntttanaagggganaaaaatttttggnccnaatgttctnngaangaagnaaatggaattttggccatttgaaaccttccnaaagncagccaaaanaagggacggccccctganacnccc

SEQ ID NO: 412 - DNA, 1088 bp, Homo Sapiens
  misc_feature (2)..(7): n is a, c, g, or t
  misc_feature (873)..(873): n is a, c, g, or t
  misc_feature (906)..(906): n is a, c, g, or t
  misc_feature (927)..(927): n is a, c, g, or t
  misc_feature (940)..(940): n is a, c, g, or t
  misc_feature (943)..(943): n is a, c, g, or t
  misc_feature (996)..(996): n is a, c, g, or t
  misc_feature (1009)..(1009): n is a, c, g, or t
  misc_feature (1011)..(1011): n is a, c, g, or t
  misc_feature (1027)..(1027): n is a, c, g, or t
  misc_feature (1033)..(1033): n is a, c, g, or t
  misc_feature (1055)..(1055): n is a, c, g, or t
  misc_feature (1065)..(1065): n is a, c, g, or t
  misc_feature (1067)..(1068): n is a, c, g, or t
  misc_feature (1072)..(1075): n is a, c, g, or t
  misc_feature (1080)..(1083): n is a, c, g, or t
  misc_feature (1085)..(1087): n is a, c, g, or t
annnnnngaattagagaaattactatgagaggatcgcatcaccatcaccatcacggatcctatttaggtgacactatagaatcgtcgacccacgcgtccgccgcggcggtgaacggggcggcaggcttctcgagctccgggcccgcggcaacctcgggcgctgttctgcaggccgcgaccggcatgtacgagcaactcaagggcgagtggaaccgtaaaagccccaatcttagcaagtgcggggaagagctgggtcgactcaagctagttcttctggagctcaacttcttgccaaccacagggaccaagctgaccaaacagcagctaattctggcccgtgacatactggagatcggggcccaatggagcatcctacgcaaggacatcccctccttcgagcgctacatggcccagctcaaatgctactactttgattacaaggagcagctccccgagtcagcctatatgcaccagctcttgggcctcaacctcctcttcctgctgtcccagaaccgggtggctgagttccacacggagttggagcggctgcctgccaaggacatacagaccaatgtctacatcaagcacccagtgtccctggagcaatacctgatggagggcagctacaacaaagtgttcctggccaagggtaacatccccgccgagagctacaccttcttcattgacatcctgctcgacactatcagggatgagatcgctgggtgcatcgagaaggcctacgagaaaatccttttcactgaggccacccggatcctcttcttcaacacacccaaaaagatgacagactacgccaagaagcgagggtgggtcctgggccccaacaactactacagttttgccagccagcagcanaagccggaagacaccaccatttcccctccacanaactggccaaaaaggtcatcnaagtatgcccggncanctggaaaatgatcgtctgaacccccccgggcactgggtggggcagggcacganttatttaaaaaantnaacctgcagggtttcncccaanaaagggggactgacattccccncaaaaaaaanannaaannnnaaaannnnannna

SEQ ID NO: 413 - DNA, 1179 bp, Homo Sapiens
  misc_feature (1)..(1): n is a, c, g, or t
  misc_feature (871)..(871): n is a, c, g, or t
  misc_feature (932)..(932): n is a, c, g, or t
  misc_feature (950)..(950): n is a, c, g, or t
  misc_feature (955)..(955): n is a, c, g, or t
  misc_feature (958)..(958): n is a, c, g, or t
  misc_feature (966)..(966): n is a, c, g, or t
  misc_feature (990)..(990): n is a, c, g, or t
  misc_feature (1012)..(1012): n is a, c, g, or t
  misc_feature (1049)..(1049): n is a, c, g, or t
  misc_feature (1077)..(1077): n is a, c, g, or t
  misc_feature (1080)..(1080): n is a, c, g, or t
  misc_feature (1093)..(1093): n is a, c, g, or t
  misc_feature (1104)..(1104): n is a, c, g, or t
  misc_feature (1115)..(1115): n is a, c, g, or t
  misc_feature (1129)..(1130): n is a, c, g, or t
  misc_feature (1134)..(1134): n is a, c, g, or t
  misc_feature (1141)..(1142): n is a, c, g, or t
  misc_feature (1152)..(1152): n is a, c, g, or t
  misc_feature (1154)..(1154): n is a, c, g, or t
  misc_feature (1156)..(1156): n is a, c, g, or t
  misc_feature (1159)..(1159): n is a, c, g, or t
  misc_feature (1171)..(1171): n is a, c, g, or t
  misc_feature (1173)..(1173): n is a, c, g, or t
naatagagaaattactatgagaggatcgcatcaccatcaccatcacggatcctatttaggtgacactatagaatcgtcgacccacgcgtccggccagaaactgaaagaagccaacaagcagcagaacttcaacacagggatcaaggactttgacttctggctgtctgaggtggaggccctgctggcatccgaagattatggcaaagacctggcttctgtgaacaacctgctgaaaaagcatcaactgctggaagcagatatatctgcccatgaggatcgcctgaaggacctgaacagccaggcagacagcctgatgaccagcagtgccttcgacacctcccaagtaaaggacaagagggacaccatcaacgggcgcttccagaagatcaagagcatggcggcctcccggcgagccaagctgaatgaatcccatcgcctgcaccagttcttccgggacatggatgacgaggagtcctggatcaaggagaagaagctgctggtgggctcagaggactacggccgggacctaactggcgtgcagaacctgaggaagaagcacaagcggctggaagcagaactggctgcgcatgagccggctattcagggtgtcctggacactggcaagaagctgtccgatgacaacaccatcgggaaagaggagatccagcagcggctggcgcagtttgtggagcactggaaagagctgaagcagctggcagctgcccggggtcagcggctggaagagtccttggaatatcagcagtttgtagccaatgtggaagaggaagaagcctggatcaatgagaaaatgaccctggtggccagcgaagattatggcgacactcttgccgccatccagggcttactgaanaaacatgaagcttttgagacagacttcaccgtccacaaggatcccgtgaatgatgtctgcnccaatggacaaaacctcnttaanaanaacaatcnccatgaggagaacatctcttcaanatgaagggcctgaacgggaaantgtcaaacctggaaaaagctgcaccccaaaaaaggcnaactggatgaaaactcggccttccttcnttncactgaaggcgangtggtggaatnctggatcggtnaaaagaaacacttnnaaanaaaaatnnggccaaactntntntgncaaaccctctcncnaaaaga

SEQ ID NO: 414 - DNA, 1128 bp, Homo Sapiens
  misc_feature (841)..(841): n is a, c, g, or t
  misc_feature (844)..(844): n is a, c, g, or t
  misc_feature (865)..(865): n is a, c, g, or t
  misc_feature (889)..(889): n is a, c, g, or t
  misc_feature (926)..(926): n is a, c, g, or t
  misc_feature (955)..(955): n is a, c, g, or t
  misc_feature (960)..(960): n is a, c, g, or t
  misc_feature (962)..(962): n is a, c, g, or t
  misc_feature (972)..(972): n is a, c, g, or t
  misc_feature (1007)..(1007): n is a, c, g, or t
  misc_feature (1021)..(1021): n is a, c, g, or t
  misc_feature (1024)..(1024): n is a, c, g, or t
  misc_feature (1027)..(1027): n is a, c, g, or t
  misc_feature (1033)..(1033): n is a, c, g, or t
  misc_feature (1035)..(1035): n is a, c, g, or t
  misc_feature (1055)..(1055): n is a, c, g, or t
  misc_feature (1066)..(1066): n is a, c, g, or t
  misc_feature (1077)..(1077): n is a, c, g, or t
  misc_feature (1081)..(1081): n is a, c, g, or t
  misc_feature (1084)..(1084): n is a, c, g, or t
  misc_feature (1087)..(1087): n is a, c, g, or t
  misc_feature (1091)..(1092): n is a, c, g, or t
  misc_feature (1094)..(1094): n is a, c, g, or t
  misc_feature (1101)..(1102): n is a, c, g, or t
  misc_feature (1110)..(1111): n is a, c, g, or t
  misc_feature (1116)..(1116): n is a, c, g, or t
  misc_feature (1120)..(1120): n is a, c, g, or t
tagagaaattactatgagaggatcgcatcaccatcaccatcacggatcctatttaggtgacactatagaatcgtcgacccacgcgtccggcgtcggctgcggcgggtgtgggaggtggcgacggccggggccggggtcctgcccggctgcggaggcgggcgcgacgggcgcgggggtcgctgctcctgaggcgatgatgggcaaggaagaggagattgcgcggatcgcccggaggctggacaagatggtgaccaagaagagcgcggagggagccatggatttgctgcgggagctgaaggccatgcctatcacgctgcacctgctccagtccacccgagtcgggatgtctgtcaacgcccttcggaagcagagctcggatgaggaggtcattgcactggccaagtctctcatcaagtcctggaagaagctcctggatgcttccgatgccaaagccagggagcgggggaggggcatgcctctgcccacgtcctcgagggatgcctcagaggccccggatcccagccgcaagaggccggagctgcccagggcaccgtcgactccgaggatcaccacatttcctccggtgcctgtcacctgtgatgccgtgcgcaacaagtgccgcgagatgctgaccgctgccctgcagacggaccatgaccacgtggccatcggtgcggactgcgagcgcctgtcggctcagatcgaggaatgcatcttccgggacgttggaaacacagacatgaagtataagaaccgtgtacggagtcgtatctccaacctgaaggatgccaagaaccctgacctgcggcggaatgtgctgtgtggggccataacaccccancanatcgctgtgatgacctcaaangaaatggccagtgatgaactgaangaaatccgtaaggccatgaccaaggaggccatccganagcaccaaatggcccgcactggcggcacncaaananactgttcacntgcggcaagtgcaggaaaaaaaactgcacctaacncaggtgcaaacccncanctnttaaanancccatgaccacctttttttntctgcaacaantgtggaaaccnctgnaanttntgcnnanccctccnntaaatttnntgaancttnggccctcc

SEQ ID NO: 415 - DNA, 1121 bp, Homo Sapiens
  misc_feature (860)..(860): n is a, c, g, or t
  misc_feature (884)..(884): n is a, c, g, or t
  misc_feature (897)..(897): n is a, c, g, or t
  misc_feature (934)..(934): n is a, c, g, or t
  misc_feature (963)..(963): n is a, c, g, or t
  misc_feature (982)..(982): n is a, c, g, or t
  misc_feature (995)..(995): n is a, c, g, or t
  misc_feature (1002)..(1002): n is a, c, g, or t
  misc_feature (1012)..(1012): n is a, c, g, or t
  misc_feature (1015)..(1015): n is a, c, g, or t
  misc_feature (1032)..(1032): n is a, c, g, or t
  misc_feature (1036)..(1036): n is a, c, g, or t
  misc_feature (1040)..(1040): n is a, c, g, or t
  misc_feature (1053)..(1053): n is a, c, g, or t
  misc_feature (1055)..(1055): n is a, c, g, or t
  misc_feature (1060)..(1060): n is a, c, g, or t
  misc_feature (1065)..(1066): n is a, c, g, or t
  misc_feature (1074)..(1074): n is a, c, g, or t
  misc_feature (1084)..(1084): n is a, c, g, or t
  misc_feature (1086)..(1086): n is a, c, g, or t
  misc_feature (1090)..(1090): n is a, c, g, or t
  misc_feature (1093)..(1093): n is a, c, g, or t
  misc_feature (1099)..(1099): n is a, c, g, or t
  misc_feature (1107)..(1107): n is a, c, g, or t
  misc_feature (1112)..(1112): n is a, c, g, or t
  misc_feature (1114)..(1114): n is a, c, g, or t
  misc_feature (1116)..(1118): n is a, c, g, or t
tagagaaattactatgagaggatcgcatcaccatcaccatcacggatcctatttaggtgacactatagaatcgtcgacccacgcgtccgtgattatctaccgggacctcatcagccacgatgagatgttctccgacatctacaagatccgggagatcgcggacgggttgtgcctggaggtggaggggaagatggtcagtaggacagaaggtaacattgatgactcgctcattggtggaaatgcctccgctgaaggccccgagggcgaaggtaccgaaagcacagtaatcactggtgtcgatattgtcatgaaccatcacctgcaggaaacaagtttcacaaaagaagcctacaagaagtacatcaaagattacatgaaatcaatcaaagggaaacttgaagaacagagaccagaaagagtaaaaccttttatgacaggggctgcagaacaaatcaagcacatccttgctaatttcaaaaactaccagttctttattggtgaaaacatgaatccagatggcatggttgctctattggactaccgtgaggatggtgtgaccccatatatgattttctttaaggatggtttagaaatggaaaaatgttaacaaatgtggcaattattttggatctatcacctgtcatcataactggcttctgcttgtcatccacacaacaccaggacttaagacaaatgggactgatgtcatcttgagctcttcatttattttgactgtgatttatttggagtggaggcattgtttttaagaaaaacatgtcatgtaggttgtctaaaaataaaatgcatttaaactcatttgagagaatgccttttagtttaatgcatatttaaactaaatngatcctgtagtgttcctggagaanctagagcctgatngtaggctactactcatcaattaacttctacagtgganactacttctgggactggaatataaaaaanaatcaaaggttctgatttngagttgcaataangggaaanaccatgctcntancagtgccaacatctgangtgngganccttacccatttncntcccntacannggaagtanttactggaananattnccngaaaanaaaaaaanactcntncnnngga

SEQ ID NO: 416 - DNA, 1390 bp, Homo Sapiens
  misc_feature (1)..(1): n is a, c, g, or t
  misc_feature (3)..(3): n is a, c, g, or t
  misc_feature (40)..(40): n is a, c, g, or t
  misc_feature (53)..(53): n is a, c, g, or t
  misc_feature (810)..(810): n is a, c, g, or t
  misc_feature (813)..(813): n is a, c, g, or t
  misc_feature (822)..(822): n is a, c, g, or t
  misc_feature (847)..(847): n is a, c, g, or t
  misc_feature (899)..(899): n is a, c, g, or t
  misc_feature (923)..(923): n is a, c, g, or t
  misc_feature (931)..(931): n is a, c, g, or t
  misc_feature (940)..(940): n is a, c, g, or t
  misc_feature (942)..(942): n is a, c, g, or t
  misc_feature (950)..(950): n is a, c, g, or t
  misc_feature (952)..(952): n is a, c, g, or t
  misc_feature (956)..(956): n is a, c, g, or t
  misc_feature (961)..(961): n is a, c, g, or t
  misc_feature (994)..(994): n is a, c, g, or t
  misc_feature (1002)..(1002): n is a, c, g, or t
  misc_feature (1010)..(1010): n is a, c, g, or t
  misc_feature (1012)..(1012): n is a, c, g, or t
  misc_feature (1036)..(1036): n is a, c, g, or t
  misc_feature (1057)..(1058): n is a, c, g, or t
  misc_feature (1066)..(1066): n is a, c, g, or t
  misc_feature (1069)..(1069): n is a, c, g, or t
  misc_feature (1087)..(1087): n is a, c, g, or t
  misc_feature (1098)..(1099): n is a, c, g, or t
  misc_feature (1106)..(1107): n is a, c, g, or t
  misc_feature (1120)..(1120): n is a, c, g, or t
  misc_feature (1122)..(1122): n is a, c, g, or t
  misc_feature (1129)..(1129): n is a, c, g, or t
  misc_feature (1132)..(1132): n is a, c, g, or t
  misc_feature (1137)..(1137): n is a, c, g, or t
  misc_feature (1145)..(1145): n is a, c, g, or t
  misc_feature (1148)..(1148): n is a, c, g, or t
  misc_feature (1150)..(1150): n is a, c, g, or t
  misc_feature (1171)..(1171): n is a, c, g, or t
  misc_feature (1173)..(1173): n is a, c, g, or t
  misc_feature (1176)..(1176): n is a, c, g, or t
  misc_feature (1179)..(1179): n is a, c, g, or t
  misc_feature (1193)..(1193): n is a, c, g, or t
  misc_feature (1200)..(1200): n is a, c, g, or t
  misc_feature (1208)..(1209): n is a, c, g, or t
  misc_feature (1214)..(1214): n is a, c, g, or t
  misc_feature (1224)..(1224): n is a, c, g, or t
  misc_feature (1234)..(1234): n is a, c, g, or t
  misc_feature (1237)..(1237): n is a, c, g, or t
  misc_feature (1246)..(1246): n is a, c, g, or t
  misc_feature (1248)..(1248): n is a, c, g, or t
  misc_feature (1258)..(1258): n is a, c, g, or t
  misc_feature (1261)..(1261): n is a, c, g, or t
  misc_feature (1266)..(1266): n is a, c, g, or t
  misc_feature (1275)..(1275): n is a, c, g, or t
  misc_feature (1281)..(1281): n is a, c, g, or t
  misc_feature (1283)..(1283): n is a, c, g, or t
  misc_feature (1286)..(1286): n is a, c, g, or t
  misc_feature (1293)..(1293): n is a, c, g, or t
  misc_feature (1297)..(1297): n is a, c, g, or t
  misc_feature (1316)..(1316): n is a, c, g, or t
  misc_feature (1321)..(1321): n is a, c, g, or t
  misc_feature (1327)..(1328): n is a, c, g, or t
  misc_feature (1337)..(1337): n is a, c, g, or t
  misc_feature (1341)..(1342): n is a, c, g, or t
  misc_feature (1348)..(1349): n is a, c, g, or t
  misc_feature (1361)..(1361): n is a, c, g, or t
  misc_feature (1370)..(1370): n is a, c, g, or t
  misc_feature (1374)..(1374): n is a, c, g, or t
  misc_feature (1376)..(1376): n is a, c, g, or t
nantagagaaattactatggagaggatcgcatcaccatcnccatcacgggatnctatttaggtgacactatagaatcgtcgacccacgcgtccggcaaaatggcgcgggagaaggagatgcaggagttcacccgtagcttcttccgaggccgcccggacctcagcacgcttacgcattccatcgtgcggcggaggtacttagctcactcgggccgcagccacctggagcccgaggagaagcaggcactgaagcggctggtggaggaggagctgctgaagatgcaggtggatgaagccgcttccagggaagacaaactggaccttaccaagaagggcaagaggcctcccaccccttgtagcgacccggagagaaaaaggttccgcttcaattcagagtcggagtccggctctgaagcctccagcccagactactttggacccccagcaaagaatggggtggcagcagaagtcagcccagccaaagaggagaatccaaggcgagcctcaaaggcagttgaggagagcagtgatgaggaacggcagagggacctgcccgcacagaggggagaggagagcagtgaggaggaggaaaaggggtacaaggggaagactaggaagaaacctgtggtaaagaagcaggcaccaggcaaggcctcagtcagtaggaagcaggccagggaagaaagtgaggagagcgaggcagaacccgttcagaggacagcaaagaaggtggagggaaataaaggaactaaaagcctgaaggaaagtgaacaggagagtgaagaggagatcctagcccagaagaaagancanagagaggangaagtggaggaggaagagaaagaanaggatgaggaaaagggggattggaaacccagaaccaggagcaatggccgganaaagtcagctagggaggaaagganctgttaancaaaaaagncnaggcaaanangctnttggnagactcaaacagcgaggaaaacaaaaagaggcncccaccantggggatnanagtgggaaaaataaaaaacccccnttgcaaaggaaaaatgaggannggaccccnctnaaggggggaaaaaagttntaatggaaacnnccaggannaagaaaaaaattngnaaggggnaanccccncttaaggnttntnaaaaatggccaaatggggccncnccntgntaaaaaattttttngaaaggngtttattnnccctngccgggggancccccggggnaanaaaaccctntncaaaaaaccncgnagggnggaacaaantccttncnttnaaagaancaancccaaaagaaggttttccntcccngaaaanncccccttgnaagnnaaactnnttcgcggggccncaaaaaaanttgncnttttcaaagcctta

SEQ ID NO: 417 - DNA, 1135 bp, Homo Sapiens
  misc_feature (880)..(880): n is a, c, g, or t
  misc_feature (893)..(893): n is a, c, g, or t
  misc_feature (931)..(931): n is a, c, g, or t
  misc_feature (937)..(937): n is a, c, g, or t
  misc_feature (945)..(945): n is a, c, g, or t
  misc_feature (949)..(949): n is a, c, g, or t
  misc_feature (978)..(978): n is a, c, g, or t
  misc_feature (994)..(994): n is a, c, g, or t
  misc_feature (1013)..(1013): n is a, c, g, or t
  misc_feature (1025)..(1025): n is a, c, g, or t
  misc_feature (1032)..(1032): n is a, c, g, or t
  misc_feature (1043)..(1043): n is a, c, g, or t
  misc_feature (1046)..(1046): n is a, c, g, or t
  misc_feature (1053)..(1053): n is a, c, g, or t
  misc_feature (1061)..(1061): n is a, c, g, or t
  misc_feature (1065)..(1067): n is a, c, g, or t
  misc_feature (1071)..(1071): n is a, c, g, or t
  misc_feature (1079)..(1079): n is a, c, g, or t
  misc_feature (1082)..(1082): n is a, c, g, or t
  misc_feature (1085)..(1085): n is a, c, g, or t
  misc_feature (1092)..(1092): n is a, c, g, or t
  misc_feature (1097)..(1098): n is a, c, g, or t
  misc_feature (1109)..(1109): n is a, c, g, or t
  misc_feature (1111)..(1111): n is a, c, g, or t
  misc_feature (1126)..(1126): n is a, c, g, or t
atagagagattactatgagaggatcgcatcaccatcaccatcacggatcctatttaggtgacactatagaatcgtcgacccacgcgtccggggttaggcagaaatgggatcagaaatcacagaaaccccgagactcttcagttgaagttcgtagtgattgggaagtgaaagaggaaatggattttcctcagttgatgaagatgcgctacttggaagtatcagagccacaggacattgagtgttgtggggccctagaatactacgacaaagcctttgaccgcatcaccacgaggagtgagaagccactgcggagcatcaagcgcatcttccacactgtcaccaccacagacgaccctgtcatccgcaagctggcaaaaactcaggggaatgtgtttgccactgatgccatcctggccacgctgatgagctgtacccgctcagtgtattcctgggatattgtcgtccagagagttgggtccaaactcttctttgacaagagagacaactctgactttgacctcctgacagtgagtgagactgccaatgagccccctcaagatgaaggtaattccttcaattcaccccgcaacctggccatggaggcaacctacatcaaccacaatttctcccagcagtgcttgagaatggggaaggaaagatacaacttccccaacccaaacccgtttgtggaggacgacatggataagaatgaaatcgcctctgttgcgtaccgttaccgcaggtggaagcttggagatgatattgaccttattgtccgttgtgagcacgatggcgtcatgactggagccaacggggaagtgtcccttcatcaacatcaagacactcaatgagtgggattccaggcactgtaatggcgttngactgggcgtcanaagctggactctcacgaggggctgtcattgccccgganctgaanaacaacanctanagttggcccgggggacctgctgtgctttnctggctggatctgaanacctcaagcttggttatgngtctcggtaccncgtaaanactccctcccnccncttcttncttaggcncccnnnaatncaaacctnaangantttgccnccccnnaatcacctgangnggaaaaagccggggnattttaccc

SEQ ID NO: 418 - DNA, 1086 bp, Homo Sapiens
  misc_feature (771)..(771): n is a, c, g, or t
  misc_feature (861)..(861): n is a, c, g, or t
  misc_feature (889)..(889): n is a, c, g, or t
  misc_feature (920)..(920): n is a, c, g, or t
  misc_feature (927)..(927): n is a, c, g, or t
  misc_feature (935)..(935): n is a, c, g, or t
  misc_feature (950)..(950): n is a, c, g, or t
  misc_feature (953)..(953): n is a, c, g, or t
  misc_feature (957)..(957): n is a, c, g, or t
  misc_feature (965)..(965): n is a, c, g, or t
  misc_feature (972)..(972): n is a, c, g, or t
  misc_feature (976)..(976): n is a, c, g, or t
  misc_feature (979)..(979): n is a, c, g, or t
  misc_feature (982)..(982): n is a, c, g, or t
  misc_feature (988)..(988): n is a, c, g, or t
  misc_feature (992)..(992): n is a, c, g, or t
  misc_feature (1002)..(1002): n is a, c, g, or t
  misc_feature (1006)..(1006): n is a, c, g, or t
  misc_feature (1010)..(1010): n is a, c, g, or t
  misc_feature (1028)..(1028): n is a, c, g, or t
  misc_feature (1034)..(1034): n is a, c, g, or t
  misc_feature (1036)..(1036): n is a, c, g, or t
  misc_feature (1042)..(1042): n is a, c, g, or t
  misc_feature (1048)..(1048): n is a, c, g, or t
  misc_feature (1051)..(1051): n is a, c, g, or t
  misc_feature (1056)..(1057): n is a, c, g, or t
  misc_feature (1060)..(1060): n is a, c, g, or t
  misc_feature (1068)..(1068): n is a, c, g, or t
  misc_feature (1083)..(1083): n is a, c, g, or t
agagaaattaactatgagaggatcgcatcaccatcaccatcacggatcctatttaggtgacactatagaatcgtcgacccacgcgtccgcgatgtggccgtggaggggcttaacgggcagctgcccaaccttgacctgctcaatctcttccagaccttctgccagaaagggggcctgttgtgcacgcttcagggcaagctgcagcccgaggactggacatcattggatggaccgctgcagggcctgcagacactgctgctcatggttctgcggcaggcctccggccgcccccacggctcccatggcctcttcctgcgctaccgtgtggaggccctaaccctgcgtggcatcaatagcttccgccagtacaagtatgacctggtggcagtgggcaaggctttggagggcatgttccgcaagctcaaccacctcctggagcgcctgcaccagtccttcttcctctacttgctccccggcctctcccgcttcgtctccatcggcctctacatgcccgctgtcggcttcttgctcctggtccttggtctcaaggctctggaactgtggatgcagctgcatgaggctggaatgggccttgaggagcccgggggtgcccctggccccagtgtaccccttcccccatcacagggtgtggggctggcctcgctcgtggcacctctgctgatctcacaggccatgggactggccctctatgtcctgccagtgctgggccaacacgttgccacccagcacttcccagtggcaaaagctgangctgtggtgctgacactgctggcgatttatgcagctggcctggccctgccccacaatacccaccgggtggtaagcacacaggcccaaaanaggggctggatggcactgaaactggtanccctgatctactaacactgcagctgggctgnatcgccntcaacaanttctcaatggcttcntgntggncaaccacnatggtgnccantgntgngcttgncaancctcatgggncccngaancctctatgctgccctggngggggntnaaaaancccggnaancaacnntcnttgggaancctgtttctgggggngga

SEQ ID NO: 419 - DNA, 887 bp, Homo Sapiens
tgagaggtcgcatcaccatcaccatcacggatcctatttaggtgacactatagaatcgtcgacccacgcgtccgctgacgaggacctggcgcaggtggtggacgagctcatccaggaggccctgcagagggactgtgaggaagttggctctgcgggtgctgcctacgcagctgccgccctgggtgtttctaatgctgctatggaggatttgttaacagctgcaaccacgggcattttgaggcacattgcagctgaagaagtgtctaaggaaagagagcgaagggagcaggagaggcagcgggctgaagaggaaaggttgaaacaagagagagagctggtgttaagtgagctgagccagggcctggccgtggagctgatggaacgcgtgatgatggagtttgtgagggaaacctgctcccaggagttgaagaatgcagtagagacagaccaaagggtccgtgtggcccgttgctgtgaggatgtctgtgcccacttagtggacttgtttctcgtggaggaaatcttccagactgcaaaggagaccctccaggagcttcagtgcttctgcaagtatctacagcggtggagggaagctgtcacagcccgcaagaaactgaggcgccaaatgcgggctttccctgctgcgccctgctgcgtggacgtgagcgaccggctgagggcgctggcgcccagcgcagagtgccccattgctgaagagaacctggccaggggcctcctggacctgggccatgcagggagattgggcatctcctgcaccaggttaatgcggctcagaaacaagacagctcaccagatgaaggttcagcacttctaccagcagctgctgagtgatgtggcatgggcgtctctggacctgccatccctcg

SEQ ID NO: 420 - DNA, 1162 bp, Homo Sapiens
  misc_feature (1)..(1): n is a, c, g, or t
  misc_feature (749)..(749): n is a, c, g, or t
  misc_feature (780)..(780): n is a, c, g, or t
  misc_feature (840)..(840): n is a, c, g, or t
  misc_feature (863)..(863): n is a, c, g, or t
  misc_feature (905)..(905): n is a, c, g, or t
  misc_feature (951)..(951): n is a, c, g, or t
  misc_feature (972)..(972): n is a, c, g, or t
  misc_feature (982)..(982): n is a, c, g, or t
  misc_feature (987)..(987): n is a, c, g, or t
  misc_feature (990)..(990): n is a, c, g, or t
  misc_feature (992)..(992): n is a, c, g, or t
  misc_feature (1012)..(1012): n is a, c, g, or t
  misc_feature (1016)..(1016): n is a, c, g, or t
  misc_feature (1035)..(1035): n is a, c, g, or t
  misc_feature (1051)..(1051): n is a, c, g, or t
  misc_feature (1059)..(1059): n is a, c, g, or t
  misc_feature (1064)..(1064): n is a, c, g, or t
  misc_feature (1067)..(1067): n is a, c, g, or t
  misc_feature (1069)..(1069): n is a, c, g, or t
  misc_feature (1082)..(1082): n is a, c, g, or t
  misc_feature (1088)..(1088): n is a, c, g, or t
  misc_feature (1090)..(1090): n is a, c, g, or t
  misc_feature (1095)..(1095): n is a, c, g, or t
  misc_feature (1099)..(1099): n is a, c, g, or t
  misc_feature (1108)..(1108): n is a, c, g, or t
  misc_feature (1115)..(1115): n is a, c, g, or t
  misc_feature (1132)..(1132): n is a, c, g, or t
  misc_feature (1137)..(1137): n is a, c, g, or t
  misc_feature (1141)..(1142): n is a, c, g, or t
  misc_feature (1145)..(1145): n is a, c, g, or t
  misc_feature (1147)..(1147): n is a, c, g, or t
  misc_feature (1152)..(1153): n is a, c, g, or t
  misc_feature (1159)..(1159): n is a, c, g, or t
naatagagagattactatgagaggatcgcatcaccatcaccatcacggatcctatttaggtgacactatagaatcgtcgacccacgcgtccggttctaaggccaggagcacggtgagccacagtctgttggtagaatttggcgtcttgatagttgagaaaatggcgatgacactgttggaagactggtgccgggggatggatgtgaactcccagagagctctgttagtctggggcatcccagtgaactgtgatgaggctgaaatcgaagagaccctccaggctgcgatgccccaggtctcctaccgaatgcttgggagaatgttctggagggaagaaaatgcgaaagcagccttattagagctcactggcgctgtagattacgccgcgatccccagggagatgccgggcaaaggaggggtctggaaagtgttatttaagcccccaacttctgatgctgaatttttagaaagattgcacctcttcctagctagagaggggtggaccgtgcaagatgttgcccgtgtccttgggtttcagaaccctactccgaccccgggcccagagatgccagcagagatgctaaactatattttggataatgttattcagcctcttgttgagtccatatggtacaagaggctgacacttttctcggggagggacatcccagggcctggagaggaaacctttgatccctggctggagcacactaatgaggtcctagaggagtggcaggtgtccgatgtanaaaagaggcggcggttgatggagagtcttanaggccccgccgctgatgttattcgcatccttaagtccaacaaccccgcgataaccactgnccgaatgcctgaaggcgcttgancaggtgttttgggaagcgttgaaagctctagggatgccccanatcaaatttctgaacacttatcaaaacccgggaaaaaaaattgtcngcttatgtcattcgtctggancctctgctanaaaanggngnaaaaaaagggggccattganaaanaaaatgtgaaccaggcccncctaaaacaggtcatngccggggnccaanccnancggggcccttccnaaaggnancttgnggcnttacggggnctggggnaagggccacccccaaanccccnttcnnttncnggggnnaatccnggg

SEQ ID NO: 421 - DNA, 929 bp, Homo Sapiens
  misc_feature (3)..(4): n is a, c, g, or t
  misc_feature (15)..(15): n is a, c, g, or t
  misc_feature (18)..(19): n is a, c, g, or t
  misc_feature (37)..(38): n is a, c, g, or t
  misc_feature (44)..(44): n is a, c, g, or t
  misc_feature (51)..(51): n is a, c, g, or t
  misc_feature (59)..(59): n is a, c, g, or t
  misc_feature (82)..(82): n is a, c, g, or t
  misc_feature (93)..(93): n is a, c, g, or t
  misc_feature (106)..(106): n is a, c, g, or t
  misc_feature (892)..(892): n is a, c, g, or t
  misc_feature (895)..(895): n is a, c, g, or t
  misc_feature (897)..(897): n is a, c, g, or t
  misc_feature (899)..(899): n is a, c, g, or t
  misc_feature (907)..(907): n is a, c, g, or t
  misc_feature (916)..(920): n is a, c, g, or t
  misc_feature (922)..(929): n is a, c, g, or t
ttnngaggaaaaatnacnnaggaggagggatcggcanncaccantcaccantcacgggnatcctatttttagggtggacacntatagaatcgntcgacccacgcgntccggtgtaaaagaaaatcatagtaactgtaccatattattaacccctaaatcaaactttttttgtcttgtgtatcttgatttttctgtgtgctttatagtgaagcagccgacacgagtcgttgttcataaaacagcttttgaaagttgagagcacacccctggagaaccgactgtgcttgcttacgtttggttcatgacttaaaaatcgagtacaggagttattcctgatgaagctaaagctttgtctctgttggcaccagctaatgcagtggcaggtcttctgcctggtggtggactcctgcctactcctaacccacttacccagattggcgctgttccactggctgctttgggggctcctactcttgatcctgcccttgctgcacttgggcttcctggagcaaacttgaactctcagtctcttgctgcagatcagttgctgaagcttatgagtactgttgatcccaagttgaatcatgtagctgctggtctcgtttcaccaagtctgaaatcggatacctctagtaaagaaatagaggaagctatgaaaagagtacgagaagcacagtccctaatttctgctgctatagaaccagataagaaagaagaaaaaagaaggcattcaagatcaagatcacgttctaggaggaggaggactccctcatcttctagacacaggcggtcaagaagcagatcgagacggcggtcacattctaagtctaggagtcggcgacgatccaaaagcccaaggcggaaaaaaatctcattccaaaaaaagaggtanaangncnagggagcncatccaaannnnnannnnnnnn

SEQ ID NO: 422 - DNA, 1223 bp, Homo Sapiens
  misc_feature (898)..(898): n is a, c, g, or t
  misc_feature (926)..(926): n is a, c, g, or t
  misc_feature (955)..(955): n is a, c, g, or t
  misc_feature (964)..(964): n is a, c, g, or t
  misc_feature (968)..(968): n is a, c, g, or t
  misc_feature (978)..(978): n is a, c, g, or t
  misc_feature (986)..(986): n is a, c, g, or t
  misc_feature (1012)..(1012): n is a, c, g, or t
  misc_feature (1037)..(1037): n is a, c, g, or t
  misc_feature (1042)..(1042): n is a, c, g, or t
  misc_feature (1044)..(1044): n is a, c, g, or t
  misc_feature (1058)..(1058): n is a, c, g, or t
  misc_feature (1077)..(1077): n is a, c, g, or t
  misc_feature (1090)..(1090): n is a, c, g, or t
  misc_feature (1102)..(1102): n is a, c, g, or t
  misc_feature (1109)..(1109): n is a, c, g, or t
  misc_feature (1112)..(1113): n is a, c, g, or t
  misc_feature (1117)..(1117): n is a, c, g, or t
  misc_feature (1121)..(1121): n is a, c, g, or t
  misc_feature (1123)..(1123): n is a, c, g, or t
  misc_feature (1133)..(1133): n is a, c, g, or t
  misc_feature (1150)..(1150): n is a, c, g, or t
  misc_feature (1154)..(1154): n is a, c, g, or t
  misc_feature (1160)..(1160): n is a, c, g, or t
  misc_feature (1162)..(1163): n is a, c, g, or t
  misc_feature (1182)..(1182): n is a, c, g, or t
  misc_feature (1185)..(1185): n is a, c, g, or t
  misc_feature (1200)..(1200): n is a, c, g, or t
  misc_feature (1203)..(1203): n is a, c, g, or t
  misc_feature (1206)..(1207): n is a, c, g, or t
  misc_feature (1209)..(1210): n is a, c, g, or t
attagagaaattactatgagaggatcgcatcaccatcaccatcacggatcctatttaggtgacactatagaatcgtcgacccacgcgtccgcccccttcaggatccgtgaggaagaccagaaagaacaagcagaagactcctggaaacggagatggtggcagtaccagcgaagcacctcagccccctcggaagaaaagggcccgggcagaccccactgttgaaagtgaggaggcgtttaagaatagaatggaggttaaagtgaagattcctgaagaattaaaaccatggcttgttgaggactgggacttagttaccaggcagaagcagctgtttcaactccctgccaagaaaaatgtagatgcaattctggaggagtatgcaaattgcaagaaatcgcagggaaatgttgataataaggaatatgcggttaatgaagttgtggcaggaataaaagaatatttcaatgtgatgttgggcactcagctgctctacaaatttgagaggccccagtatgctgaaatcctcttggctcaccctgatgctccaatgtcccaggtttatggagcaccacacctactgagattatttgtaagaattggagcaatgttggcctatacgccccttgatgagaaaagccttgcattattgttgggctatttgcatgatttcctaaaatatctggcaaagaattctgcatctctctttactgccagtgattacaaagtggcttctgctgagtaccaccgcaaagccctgtgagcgtctacagacagctcaccatttttgtcctgtatctgtaaacactttttgttcttagtctttttcttgtaaaattgatgttctttaaaatcgttaatgtataacagggcttatgtttcagtttgtttcccgttctgnttttaacagaaaataaaaggagtgtaanctccttttctcatttcaaagttgctaccngtgtatgcngtanttaaacaaanaaaaaacnttccgtaaaacattttattgcctaanttgaaacattgcttggaatgctggngggtncnaatcccttgacccnacccaattttccaaaatgngttaaggctatgngaaaaaaccccntgattcntanngccnaagntncactttatgntatttcccggaaacccnggcntttggncnnttttttttttttggggggntgnaaaaaaaaaaccccnccntgnnannccccttttgtttt

SEQ ID NO: 423 - DNA, 1136 bp, Homo Sapiens
  misc_feature (1)..(1): n is a, c, g, or t
  misc_feature (848)..(848): n is a, c, g, or t
  misc_feature (855)..(855): n is a, c, g, or t
  misc_feature (860)..(860): n is a, c, g, or t
  misc_feature (863)..(863): n is a, c, g, or t
  misc_feature (872)..(872): n is a, c, g, or t
  misc_feature (879)..(879): n is a, c, g, or t
  misc_feature (926)..(926): n is a, c, g, or t
  misc_feature (960)..(960): n is a, c, g, or t
  misc_feature (982)..(982): n is a, c, g, or t
  misc_feature (988)..(988): n is a, c, g, or t
  misc_feature (999)..(999): n is a, c, g, or t
  misc_feature (1002)..(1002): n is a, c, g, or t
  misc_feature (1011)..(1011): n is a, c, g, or t
  misc_feature (1025)..(1026): n is a, c, g, or t
  misc_feature (1049)..(1049): n is a, c, g, or t
  misc_feature (1058)..(1058): n is a, c, g, or t
  misc_feature (1079)..(1079): n is a, c, g, or t
  misc_feature (1083)..(1084): n is a, c, g, or t
  misc_feature (1091)..(1091): n is a, c, g, or t
  misc_feature (1093)..(1094): n is a, c, g, or t
  misc_feature (1102)..(1103): n is a, c, g, or t
  misc_feature (1105)..(1105): n is a, c, g, or t
  misc_feature (1108)..(1109): n is a, c, g, or t
  misc_feature (1115)..(1115): n is a, c, g, or t
  misc_feature (1121)..(1121): n is a, c, g, or t
  misc_feature (1126)..(1126): n is a, c, g, or t
  misc_feature (1129)..(1129): n is a, c, g, or t
ntagagaaattactatgagaggatcgcatcaccatcaccatcacggatcctatttaggtgacactatagaatcgtcgacccacgcgtccgcaagcaggttcctaaagcccagaaaggtggaagaagatgagctcttggaaaaatcaccactgcagctagggaatgagcctttgcaacgcttgctcagtgacaatggcatcaacagactatccctcatggcccctgacaccccggccggtaccccacttagtggtgtgggtcgccgcacatcagtcctcttcaagaaggccaagaatggggttaagctacagagaagcccagacagggtcctggagaatggcgaggaccatggtgtggcaggctctcctgcctctccagccagcatcgaggaagagcgccactcccggaagcggccaaggagcaggagctgtagtgagagcgaaggggagaggtccccccagcaggaggaagagacaggcatgaccaacggctttggaaaacacaccgaaagcgggtctgactctgaatgtagtttgggtctcagtggtggactggcatttgaagcttgcagtggtctgacgccccccaaacgcagccgtgggaagccagccctgtctcgagtgcccttcctggaaggtgtgaacggagactctgactacaatggctcaggcagaagcctcctgctgccctttgaagaccgcggagacctggagcccttggagctggtgtgggccaagtgccgaggctacccctcctaccctgccttgatcatcgatcccaagatgccccgggagggcctcctgcacaatggcgttcccatccctgtccccccgctggacgtgctgaanctggganagcanaancaggcagangctgganagaagctcttccttgtcctcttctttgacaacaagcgcacctggcantggcttccaagggacaaaagtcctgcccttgggntgtggaaaaccccgtggacaanctcaanatgctggaagnccncaagaccancatcccccaagtcnntgcaggtggcctatgaccgtgcnaatgatccncctgaaccaaaatccgggggncccnnttctttntnnctttccanntnctnnaagggnagggtngggcntgnatccctt

SEQ ID NO: 424 - DNA, 1067 bp, Homo Sapiens
  misc_feature (8)..(8): n is a, c, g, or t
  misc_feature (101)..(101): n is a, c, g, or t
  misc_feature (107)..(108): n is a, c, g, or t
  misc_feature (190)..(191): n is a, c, g, or t
  misc_feature (542)..(542): n is a, c, g, or t
  misc_feature (563)..(563): n is a, c, g, or t
  misc_feature (666)..(666): n is a, c, g, or t
  misc_feature (670)..(670): n is a, c, g, or t
  misc_feature (677)..(677): n is a, c, g, or t
  misc_feature (820)..(820): n is a, c, g, or t
  misc_feature (825)..(825): n is a, c, g, or t
  misc_feature (843)..(843): n is a, c, g, or t
  misc_feature (877)..(877): n is a, c, g, or t
  misc_feature (884)..(884): n is a, c, g, or t
  misc_feature (887)..(887): n is a, c, g, or t
  misc_feature (901)..(901): n is a, c, g, or t
  misc_feature (939)..(939): n is a, c, g, or t
  misc_feature (944)..(945): n is a, c, g, or t
  misc_feature (947)..(947): n is a, c, g, or t
  misc_feature (952)..(952): n is a, c, g, or t
  misc_feature (956)..(956): n is a, c, g, or t
  misc_feature (958)..(958): n is a, c, g, or t
  misc_feature (962)..(962): n is a, c, g, or t
  misc_feature (968)..(968): n is a, c, g, or t
  misc_feature (971)..(971): n is a, c, g, or t
  misc_feature (985)..(985): n is a, c, g, or t
  misc_feature (992)..(992): n is a, c, g, or t
  misc_feature (996)..(996): n is a, c, g, or t
  misc_feature (1006)..(1006): n is a, c, g, or t
  misc_feature (1008)..(1008): n is a, c, g, or t
  misc_feature (1015)..(1015): n is a, c, g, or t
  misc_feature (1017)..(1017): n is a, c, g, or t
  misc_feature (1024)..(1024): n is a, c, g, or t
  misc_feature (1027)..(1027): n is a, c, g, or t
  misc_feature (1033)..(1034): n is a, c, g, or t
  misc_feature (1037)..(1037): n is a, c, g, or t
  misc_feature (1045)..(1045): n is a, c, g, or t
  misc_feature (1054)..(1054): n is a, c, g, or t
  misc_feature (1063)..(1063): n is a, c, g, or t
  misc_feature (1066)..(1066): n is a, c, g, or t
gattaganagattactatgagaggatcgcatcaccatcaccatcacggatcctatttaggtgacactatagaatcgtcgacccacgcgtccggcagaggangcaggnncgacggcggtgggcggtgcgttgcgcaagctcgggcctcccgctcgccgctgcgttgggaccgcgcaacccggtgtgtgcannggcctcagggatccggaaagtctaggactgaacttctcctaacatccagtaatggggacctggaacctgggcgtactagagtgccgcgcgtagggctccaggtcgctggcttctgcgctttcttcctctccaaagttgagtatctcctatctgtgtcctcatacatactgccgcctgaggtgccatggcccccaagccgggggccgagtggagcacagccctgtcccatctggtgctgggagtggtgtctctgcacgcagccgtgagcacagccgaggcaagtcgaggggctgctgctggcttcctgctccaggtcttggctgccaccaccacgctggccccagggctgancacacatgaagactgccttgntggagcctgggtggccaccgtcatcggccttccccttctggccttcgatttccactgggtgaatggggaccgctcctctgccaacctgctcctgggaggaggnatgntgctggnagtggctggcggccacctcggccctgagggccgctctgtggctggtcaggcaatgctgttggtggtcgcaatgaccatcctcattgtagctgtcttcacggccaacacttatgggatgtgggggggggcgatgctgggtgtgncaagnctcctgagccggctggangaagacaggctgctgctgctaccgaaggaggatntctgtcnctnggccttggctgtangcagctgggctttactgccgggccctgcaaacacaacncctcnnangggantgananttgnatacanccnggcagggtttctgncctgccnaaanttttcctccnanctggcangntcctggngcnttttcnntangggtaaantcttctgcnaaatgaagnggnt

SEQ ID NO: 425 - DNA, 775 bp, Homo Sapiens
tatgagaggtcgcatcaccatcaccatcacggatcctatttaggtgacactatagaatcgtcgacccacgcgtccgctgcagcggtggtcggctgttgggtgtggagtttcccagcgcccctcgggtccgaccctttgagcgttctgctccggcgccagcctacctcgctcctcggcgccatgaccacaaccaccaccttcaagggagtcgaccccaacagcaggaatagctcccgagttttgcggcctccaggtggtggatccaatttttcattaggttttgatgaaccaacagaacaacctgtgaggaagaacaaaatggcctctaatatctttgggacacctgaagaaaatcaagcttcttgggccaagtcagcaggtgccaagtctagtggtggcagggaagacttggagtcatctggactgcaaagaaggaactcctctgaagcaagctccggagacttcttatatctgaagggagaaggtgatattcatgaaaatgtggacacagacttgccaggcagcctggggcaaagtgaagagaagcccgtgcctgctgcgcctgtgcccagcccggtggccccggccccaatgccatccagaagaaatccccctggcggcaagtccagcctcgtcttgggttagctctgactgtcctgaacgctgtcgttctgtctgtttcctccatgcttgtgaactgcacaacttgagcctgactgtacatctcttggatttgtttcattaaaaagaagcactttatgtactgctgtctttt

SEQ ID NO: 426 - DNA, 1151 bp, Homo Sapiens
  misc_feature (806)..(806): n is a, c, g, or t
  misc_feature (831)..(831): n is a, c, g, or t
  misc_feature (907)..(907): n is a, c, g, or t
  misc_feature (920)..(920): n is a, c, g, or t
  misc_feature (927)..(927): n is a, c, g, or t
  misc_feature (929)..(929): n is a, c, g, or t
  misc_feature (948)..(948): n is a, c, g, or t
  misc_feature (964)..(965): n is a, c, g, or t
  misc_feature (967)..(967): n is a, c, g, or t
  misc_feature (971)..(971): n is a, c, g, or t
  misc_feature (976)..(976): n is a, c, g, or t
  misc_feature (995)..(995): n is a, c, g, or t
  misc_feature (1002)..(1002): n is a, c, g, or t
  misc_feature (1004)..(1004): n is a, c, g, or t
  misc_feature (1007)..(1007): n is a, c, g, or t
  misc_feature (1027)..(1027): n is a, c, g, or t
  misc_feature (1032)..(1032): n is a, c, g, or t
  misc_feature (1049)..(1049): n is a, c, g, or t
  misc_feature (1051)..(1051): n is a, c, g, or t
  misc_feature (1058)..(1058): n is a, c, g, or t
  misc_feature (1062)..(1062): n is a, c, g, or t
  misc_feature (1066)..(1066): n is a, c, g, or t
  misc_feature (1070)..(1070): n is a, c, g, or t
  misc_feature (1077)..(1078): n is a, c, g, or t
  misc_feature (1081)..(1081): n is a, c, g, or t
  misc_feature (1095)..(1095): n is a, c, g, or t
  misc_feature (1117)..(1117): n is a, c, g, or t
  misc_feature (1128)..(1128): n is a, c, g, or t
  misc_feature (1135)..(1135): n is a, c, g, or t
  misc_feature (1137)..(1137): n is a, c, g, or t
  misc_feature (1142)..(1142): n is a, c, g, or t
  misc_feature (1149)..(1149): n is a, c, g, or t
atagagaaattactatgagaggatcgcatcaccatcaccatcacggatcctatttaggtgacactatagaatcgtcgacccacgcgtccgggctgccgccgtcgctgctgccggtgcaggggaaccccagtccccggacgaattgctcccgaaaggcgacgcggagaagcctgaggaggagctggaggaggacgacgatgaggagctagatgagaccctgtcggagagactatggggcctgacggagatgtttccggagagggtccggtccgcggccggagccacttttgatctttccctctttgtggctcagaaaatgtacaggttttccagggcagccttgtggattgggaccacttcctttatgatcctggttcttcccgttgtctttgagacggagaagttgcaaatggagcaacagcagcaactgcagcagcggcagatacttctaggacctaacacagggctctcaggaggaatgccaggggctctaccctcacttcctggaaagatctagattgttattgctgtttgagctgtctcagtgggataagtttgaaattcaagtgtttgaactgctgataatttggattttttttttttttttaactttggcacattgatctatctaaacctggtggggagaattatccccacattgtctcatggaaagactcaacttgcaactgtgccctccacactatccttacttctgtctccactctgataccagagtgcagccatgcagatggttattccagctctggtcacccgactcctttcaccaaattgctcctaactggaanatctcactttccccttgtggggtangaaccgatgcccagtgggagggatgtgcccctgaccattaacgactgttttttttttttttttttaaaaaatgganttgttggggcagnacatgcncncaatgtgaaacaaaaaaantgcattacccctgtanngnaagnggccnctatgaatccctatgtatnaaaagangnagncaggcttgccccttcccccnaaaanggggactatggaaaaancnggagctntttncccngcanatttggnngtnaaaccggggggggnttaaaaaaaaaaaaaccgggcnccctttttgtntttaaantnaaaangatcccncg

SEQ ID NO: 427 - DNA, 1227 bp, Homo Sapiens
  misc_feature (875)..(875): n is a, c, g, or t
  misc_feature (915)..(915): n is a, c, g, or t
  misc_feature (932)..(932): n is a, c, g, or t
  misc_feature (936)..(936): n is a, c, g, or t
  misc_feature (942)..(942): n is a, c, g, or t
  misc_feature (954)..(954): n is a, c, g, or t
  misc_feature (958)..(958): n is a, c, g, or t
  misc_feature (969)..(969): n is a, c, g, or t
  misc_feature (976)..(976): n is a, c, g, or t
  misc_feature (983)..(983): n is a, c, g, or t
  misc_feature (1001)..(1001): n is a, c, g, or t
  misc_feature (1012)..(1012): n is a, c, g, or t
  misc_feature (1017)..(1017): n is a, c, g, or t
  misc_feature (1020)..(1020): n is a, c, g, or t
  misc_feature (1029)..(1029): n is a, c, g, or t
  misc_feature (1038)..(1038): n is a, c, g, or t
  misc_feature (1044)..(1044): n is a, c, g, or t
  misc_feature (1048)..(1048): n is a, c, g, or t
  misc_feature (1057)..(1057): n is a, c, g, or t
  misc_feature (1078)..(1078): n is a, c, g, or t
  misc_feature (1114)..(1114): n is a, c, g, or t
  misc_feature (1121)..(1124): n is a, c, g, or t
  misc_feature (1126)..(1126): n is a, c, g, or t
  misc_feature (1128)..(1141): n is a, c, g, or t
  misc_feature (1144)..(1144): n is a, c, g, or t
  misc_feature (1154)..(1154): n is a, c, g, or t
  misc_feature (1160)..(1161): n is a, c, g, or t
  misc_feature (1165)..(1165): n is a, c, g, or t
  misc_feature (1179)..(1179): n is a, c, g, or t
  misc_feature (1182)..(1182): n is a, c, g, or t
  misc_feature (1188)..(1188): n is a, c, g, or t
  misc_feature (1195)..(1195): n is a, c, g, or t
  misc_feature (1197)..(1197): n is a, c, g, or t
  misc_feature (1207)..(1207): n is a, c, g, or t
  misc_feature (1215)..(1216): n is a, c, g, or t
aatagagaaattactatgagaggatcgcatcaccatcaccatcacggatcctatttaggtgacactatagaatcgtcgacccacgcgtccggcagcgacaatgattcggagctcgaggatgctgacataaagaaggagctgcagagtctgcgggagaagcacctgaaggagatctcggagctgcagagccagcagaagcaggagatcgaagctctgtaccgccgcctgggcaagccactgccccccaacgtgggcttcttccacacggcaccccccactggccgccggagaaaaaccagcaagagcaagctgaaggcaggcaagctgctaaatcccctggtgcggcagctcaaggtcgtggcctccagcacaggtcacttggctgactccagcagaggccctcccgctaaggaccctgcccaagccagtgtggggctcactgcagacagcacgggcctgagcgggaaggcagtgcagacccagcagccctgctccgtccgggcctccctgtcttcggacatctgctccggcttagccagtgatggaggcggagcgcgtggccaagggtcctccaccagcagcctggccccaggccctgagccaggcccccagcccgccctgcacgtccaggcgcaggtgaacaacagcaacaacaagaagggtaccttcacggacgacctgcacaagctggtggacgagtggacgagcaagacggtgggggccgcgcagctgaagcccacgctcaaccagctgaagcagacccagaagctgcaagacatggaggcccaggcaggctgggctgcccctggcgaggcgcgggctatgaccgcacctcgagcaggagtggggatgccacgtctgccccagcgcccggncctctgtccaccacggtcattccggaagccgccccgaccntgtccgtgccccaccanatcntgaaantgaaaacctgantgancccgcctaaangccaggnccacttnacgccgtctaatggaaantgacgaacccncaggncanctgctctcntgtccagtnacgctntttnaaccctttntaaaccttttttttccattgnaaaccaatgtatgcaaaaaaaaaaatttttggggcnaaaaaannnnanannnnnnnnnnnnnnaangggggccccncctaanngggnccaataaacttatnacngaactnggacccntnttaaaatccnaaagaccnnaaactcctttg

SEQ ID NO: 428 - DNA, 1150 bp, Homo Sapiens
  misc_feature (851)..(851): n is a, c, g, or t
  misc_feature (858)..(858): n is a, c, g, or t
  misc_feature (896)..(896): n is a, c, g, or t
  misc_feature (939)..(939): n is a, c, g, or t
  misc_feature (943)..(943): n is a, c, g, or t
  misc_feature (968)..(968): n is a, c, g, or t
  misc_feature (979)..(979): n is a, c, g, or t
  misc_feature (981)..(981): n is a, c, g, or t
  misc_feature (990)..(990): n is a, c, g, or t
  misc_feature (992)..(992): n is a, c, g, or t
  misc_feature (994)..(994): n is a, c, g, or t
  misc_feature (1025)..(1025): n is a, c, g, or t
  misc_feature (1027)..(1027): n is a, c, g, or t
  misc_feature (1030)..(1030): n is a, c, g, or t
  misc_feature (1042)..(1042): n is a, c, g, or t
  misc_feature (1049)..(1049): n is a, c, g, or t
  misc_feature (1051)..(1051): n is a, c, g, or t
  misc_feature (1058)..(1058): n is a, c, g, or t
  misc_feature (1062)..(1062): n is a, c, g, or t
  misc_feature (1077)..(1077): n is a, c, g, or t
  misc_feature (1079)..(1079): n is a, c, g, or t
  misc_feature (1091)..(1091): n is a, c, g, or t
  misc_feature (1093)..(1093): n is a, c, g, or t
  misc_feature (1096)..(1096): n is a, c, g, or t
  misc_feature (1105)..(1106): n is a, c, g, or t
  misc_feature (1131)..(1131): n is a, c, g, or t
  misc_feature (1134)..(1134): n is a, c, g, or t
  misc_feature (1137)..(1137): n is a, c, g, or t
  misc_feature (1141)..(1143): n is a, c, g, or t
  misc_feature (1146)..(1146): n is a, c, g, or t
  misc_feature (1149)..(1149): n is a, c, g, or t
tagagaaattaactatgagaggatcgcatcaccatcaccatcacggatcctatttaggtgacactatagaatcgtcgacccacgcgtccgcgggctatgacctgaagcagctgttcatcgggtcggagggcactttggggatcatcaccacggtgtccatcttgtgtccacccaagcccagggctgtgaacgtggctttcctcggctgcccaggctttgctgaggttctgcagaccttcagcacctgcaaggggatgctgggtgagatcctgtctgcattcgagttcatggatgctgtgtgcatgcagctggtcgggcgccatctccacctggccagcccggtgcaagagagtccgttttacatcctcatcgagacttcaggctccaacgcaggccatgacgctgagaagctgggccacttcctggagcacgcgctgggctccggcctggtgaccgatgggaccatggccaccgaccagaggaaagtcaagatgctgtgggccctgagggaaaggatcacagaggcgctgagccgggatggctacgtgtacaagtacgacctctccctccctgtggagcggctctacgacatcgtgactgacctgcgcgcccgcctcggcccgcacgccaagcacgtggtgggctatggccaccttggagatggtaacctgcacctcaatgtgacggcggaggccttcagcccctcgctcctggctgccctggagccccacgtgtacgagtggacggccgggcagcagggcagcgtcagcgcggaacacggagtgggcttcaggaagagggacgtcctgggctacagcaagccaccgggggccctgcagctcatgcagcanctcaagncctgctggaccccaagggcatcctcaacccctacaaangctgcccagccaggcctgacggccactcctgctgctgccaagnccantgggggtcggcgggtggctctcggncgggggtgttncngtggctctnangnaaaaccggcacgggcagggaacagcacctgntnaangactggaacccncctgggnantgccgancagncctcggcagaaattngnaaaatggggggngnagnacctctttnngggagggggccttgcacctctgaangcnggngggnnnttnccng

SEQ ID NO: 429 - DNA, 1100 bp, Homo Sapiens
  misc_feature (775)..(775): n is a, c, g, or t
  misc_feature (835)..(835): n is a, c, g, or t
  misc_feature (882)..(882): n is a, c, g, or t
  misc_feature (894)..(894): n is a, c, g, or t
  misc_feature (896)..(896): n is a, c, g, or t
  misc_feature (902)..(902): n is a, c, g, or t
  misc_feature (908)..(908): n is a, c, g, or t
  misc_feature (928)..(928): n is a, c, g, or t
  misc_feature (969)..(969): n is a, c, g, or t
  misc_feature (971)..(971): n is a, c, g, or t
  misc_feature (973)..(973): n is a, c, g, or t
  misc_feature (992)..(993): n is a, c, g, or t
  misc_feature (998)..(998): n is a, c, g, or t
  misc_feature (1000)..(1000): n is a, c, g, or t
  misc_feature (1008)..(1008): n is a, c, g, or t
  misc_feature (1023)..(1023): n is a, c, g, or t
  misc_feature (1030)..(1030): n is a, c, g, or t
  misc_feature (1032)..(1032): n is a, c, g, or t
  misc_feature (1036)..(1036): n is a, c, g, or t
  misc_feature (1040)..(1040): n is a, c, g, or t
  misc_feature (1052)..(1052): n is a, c, g, or t
  misc_feature (1054)..(1054): n is a, c, g, or t
  misc_feature (1063)..(1063): n is a, c, g, or t
  misc_feature (1070)..(1071): n is a, c, g, or t
  misc_feature (1076)..(1076): n is a, c, g, or t
  misc_feature (1079)..(1080): n is a, c, g, or t
  misc_feature (1091)..(1091): n is a, c, g, or t
  misc_feature (1097)..(1098): n is a, c, g, or t
  misc_feature (1100)..(1100): n is a, c, g, or t
tagagagaattactatggagaggatcgcatcaccatcaccatcacggatcctatttaggtgacactatagaatcgtcgacccacgcgtccgcgcttctgcccccacctccccagaacagcgtcccccattatgccgaggctgacattgttaccctgcagggcgtcaccgggggcaacacctatgctgtgcctgcactgcccccaggggcagtcggggatgggccccccagagtggatttccctcgatctcgactccgcttcaaggagaagcttggcgagggccagtttggggaggtgcacctgtgtgaggtcgacagccctcaagatctggttagtcttgatttcccccttaatgtgcgtaagggacaccctttgctggtagctgtcaagatcttacggccagatgccaccaagaatgccaggaatgatttcctgaaagaggtgaagatcatgtcgaggctcaaggacccaaacatcattcggctgctgggcgtgtgtgtgcaggacgaccccctctgcatgattactgactacatggagaacggcgacctcaaccagttcctcagtgcccaccagctggaggacaaggcagccgagggggcccctggggacgggcaggctgcgcaggggcccaccatcagctacccaatgctgctgcatgtggcagcccagatcgcctccggcatgcgctatctggccacactcaactttgtacatcgggacctggccacgcggaactgcctagttggggaaaatttcaccatcaaaatcgcanactttggcatgagccggaacctctatgctggggactattaccgtgtgcagggccgggcantgctgcccatccgctggatggcctgggagtgcatcctcatggggaanttcacgactgcnantgacgngtgggncctttggtgtgacctgtggnaggtgctgatgctctgtagggcccagccctttgggcactcncnanaaacaggtcatcaaaaacnnggggnanttcttccnggaacagggcgggangggtacntntccnggcncctggctgcccnanggccaaaanaactganncttcnggnngaaccggaatntaaaannan

SEQ ID NO: 430 - DNA, 1236 bp, Homo Sapiens
  misc_feature (803)..(803): n is a, c, g, or t
  misc_feature (882)..(882): n is a, c, g, or t
  misc_feature (885)..(885): n is a, c, g, or t
  misc_feature (937)..(937): n is a, c, g, or t
  misc_feature (988)..(988): n is a, c, g, or t
  misc_feature (996)..(996): n is a, c, g, or t
  misc_feature (1004)..(1004): n is a, c, g, or t
  misc_feature (1017)..(1017): n is a, c, g, or t
  misc_feature (1023)..(1023): n is a, c, g, or t
  misc_feature (1028)..(1028): n is a, c, g, or t
  misc_feature (1045)..(1045): n is a, c, g, or t
  misc_feature (1048)..(1048): n is a, c, g, or t
  misc_feature (1060)..(1060): n is a, c, g, or t
  misc_feature (1071)..(1071): n is a, c, g, or t
  misc_feature (1073)..(1073): n is a, c, g, or t
  misc_feature (1076)..(1076): n is a, c, g, or t
  misc_feature (1083)..(1083): n is a, c, g, or t
  misc_feature (1104)..(1104): n is a, c, g, or t
  misc_feature (1107)..(1107): n is a, c, g, or t
  misc_feature (1113)..(1113): n is a, c, g, or t
  misc_feature (1121)..(1121): n is a, c, g, or t
  misc_feature (1128)..(1128): n is a, c, g, or t
  misc_feature (1130)..(1130): n is a, c, g, or t
  misc_feature (1136)..(1136): n is a, c, g, or t
  misc_feature (1140)..(1140): n is a, c, g, or t
  misc_feature (1147)..(1147): n is a, c, g, or t
  misc_feature (1149)..(1149): n is a, c, g, or t
  misc_feature (1153)..(1153): n is a, c, g, or t
  misc_feature (1164)..(1164): n is a, c, g, or t
  misc_feature (1173)..(1173): n is a, c, g, or t
  misc_feature (1177)..(1177): n is a, c, g, or t
  misc_feature (1188)..(1188): n is a, c, g, or t
  misc_feature (1190)..(1190): n is a, c, g, or t
  misc_feature (1203)..(1203): n is a, c, g, or t
  misc_feature (1207)..(1207): n is a, c, g, or t
  misc_feature (1215)..(1215): n is a, c, g, or t
  misc_feature (1217)..(1217): n is a, c, g, or t
  misc_feature (1221)..(1221): n is a, c, g, or t
  misc_feature (1223)..(1223): n is a, c, g, or t
  misc_feature (1229)..(1229): n is a, c, g, or t
  misc_feature (1231)..(1231): n is a, c, g, or t
  misc_feature (1233)..(1233): n is a, c, g, or t
  misc_feature (1235)..(1235): n is a, c, g, or t
attagagaaattactatgagaggatcgcatcaccatcaccatcacggatcctatttaggtgacactatagaatcgtcgacccacgcgtccgggttagaaggcacaggtggcgagatgagccgggtaccagcgttcctgagcgcggccgaggtggaggaacacctccgcagctccagcctcctcatcccgcctctagagacggccctggccaacttctccagcggtcccgaaggaggggtcatgcagcccgtgcgcaccgtggtgccggtgaccaagcacaggggctacctgggggtcatgcccgcctacagtgctgcagaggatgcactgaccaccaagttggtcaccttctacgaggaccgcggcatcacctcggtcgtcccttcccaccaggctactgtgctactctttgagcccagcaatggcaccctgctggcggtcatggatggaaatgtcataactgcaaagagaacagctgcagtttctgccattgccaccaagtttctgaaacctcccagcagtgaagtgctgtgcatccttggggctggggtccaggcctacagccattatgagatcttcacagagcagttctcctttaaggaggtgaggatatggaaccgcaccaaagaaaatgcagagaagtttgcagacacagtgcaaggagaggtacgggtctgttcttcggtccaggaggctgtggcaggtgcagatgtgatcatcacagtcaccctggcaacagagcccattttgtttggtgaatgggtgaagccaggggctcacatcaatgctgttggagccagcanacctgactggagagaactggatgatgagctcatgaaagaagctgtgctgtacgtggattcccaggaggctgccctgaangantctggagatgtcctgctgtcaggggccgagatctttgctgaactgggaaaantgattaagggagtgaaaccagcccactgtgaaaaaaaccacggtgttcaantctttggnaatggcantggaaaaaaacanttgcanccaanctcatctatgaattccnggncatctggtaaanaaaaaaaaagnanttngattttnaaaatggatgcttgaagaaanatngctgcngggttccnaaaattntnaaaaanaaantgaaggnantccngtcccccaggnaactccccntttngggcttaacangntttacccttaaanggcngaaatccncntttntnttttgnantngna

SEQ ID NO: 431 - DNA, 1280 bp, Homo Sapiens
  misc_feature (823)..(823): n is a, c, g, or t
  misc_feature (861)..(861): n is a, c, g, or t
  misc_feature (893)..(893): n is a, c, g, or t
  misc_feature (939)..(939): n is a, c, g, or t
  misc_feature (945)..(945): n is a, c, g, or t
  misc_feature (947)..(947): n is a, c, g, or t
  misc_feature (949)..(949): n is a, c, g, or t
  misc_feature (966)..(966): n is a, c, g, or t
  misc_feature (973)..(973): n is a, c, g, or t
  misc_feature (979)..(979): n is a, c, g, or t
  misc_feature (983)..(984): n is a, c, g, or t
  misc_feature (991)..(991): n is a, c, g, or t
  misc_feature (1002)..(1002): n is a, c, g, or t
  misc_feature (1027)..(1028): n is a, c, g, or t
  misc_feature (1031)..(1031): n is a, c, g, or t
  misc_feature (1051)..(1051): n is a, c, g, or t
  misc_feature (1057)..(1057): n is a, c, g, or t
  misc_feature (1066)..(1066): n is a, c, g, or t
  misc_feature (1072)..(1072): n is a, c, g, or t
  misc_feature (1076)..(1076): n is a, c, g, or t
  misc_feature (1087)..(1087): n is a, c, g, or t
  misc_feature (1090)..(1090): n is a, c, g, or t
  misc_feature (1094)..(1094): n is a, c, g, or t
  misc_feature (1101)..(1101): n is a, c, g, or t
  misc_feature (1106)..(1106): n is a, c, g, or t
  misc_feature (1109)..(1109): n is a, c, g, or t
  misc_feature (1123)..(1123): n is a, c, g, or t
  misc_feature (1125)..(1126): n is a, c, g, or t
  misc_feature (1128)..(1128): n is a, c, g, or t
  misc_feature (1133)..(1133): n is a, c, g, or t
  misc_feature (1138)..(1138): n is a, c, g, or t
  misc_feature (1140)..(1141): n is a, c, g, or t
  misc_feature (1147)..(1147): n is a, c, g, or t
  misc_feature (1156)..(1156): n is a, c, g, or t
  misc_feature (1158)..(1158): n is a, c, g, or t
  misc_feature (1161)..(1161): n is a, c, g, or t
  misc_feature (1184)..(1184): n is a, c, g, or t
  misc_feature (1188)..(1188): n is a, c, g, or t
  misc_feature (1194)..(1194): n is a, c, g, or t
  misc_feature (1202)..(1202): n is a, c, g, or t
  misc_feature (1204)..(1204): n is a, c, g, or t
  misc_feature (1214)..(1214): n is a, c, g, or t
  misc_feature (1225)..(1226): n is a, c, g, or t
  misc_feature (1249)..(1249): n is a, c, g, or t
  misc_feature (1256)..(1256): n is a, c, g, or t
  misc_feature (1279)..(1280): n is a, c, g, or t
tagagagattactatgagaggatcgcatcaccatcaccatcacggatcctatttaggtgacactatagaatcgtcgacccacgcgtccgcccacgcgtccgaaccgccgccaggtcgctgttggtccacgccgcccgtcgcgccgcccgcccgctcagcgtccgccgccgccatgggagtgcaggtggaaaccatctccccaggagacgggcgcaccttccccaagcgcggccagacctgcgtggtgcactacaccgggatgcttgaagatggaaagaaatttgattcctcccgggacagaaacaagccctttaagtttatgctaggcaagcaggaggtgatccgaggctgggaagaaggggttgcccagatgagtgtgggtcagagagccaaactgactatatctccagattatgcctatggtgccactgggcacccaggcatcatcccaccacatgccactctcgtcttcgatgtggagcttctaaaactggaatgacaggaatggcctcctcccttagctccctgttcttggatctgccgtggagggatctggtgcctccagacatgtgcacatgagtccatatggagcttttcctgatgttccactccactttgtatagacatctgccctgactgaatgtgttctgtcactcagctttgcttccgacacctctgtttcctcttcccctttctcctcgtatgtgtgtttacctaaactatatgccataaacctcaagttactcattttattttgttttcattttggggtgaagattcagtttcagtcttttggatataggtttccaattaagtacatggntcaaagtattaacagcacaagtggtaagttaacattanaataggaattggtgtttgggggggggggtttngcaaagaaaaattttattttaatttttttggaaggaaatttttaanctaatnananattaaaacatttcttgnctgctgngctgcnaaannccataancaaaattttanggcccttgtttgaagaactgaaatnnctntcccaagtttgaaaaaaatntttttnggtttaaantaaaancccntaccttaaaantgnaggnggggaanggggnaanaaccttttgccttnannanttccnacccnannctcccntttaaaccntncgncttttaaaaaaaaattatgtttncttncaatgngggaaacntnaaggattttntccttgggccnncagggacctttgaaacctttttngtgggcnttttttttttccccggggttttnn

SEQ ID NO: 432 - DNA, 1179 bp, Homo Sapiens
  misc_feature (805)..(805): n is a, c, g, or t
  misc_feature (916)..(916): n is a, c, g, or t
  misc_feature (955)..(955): n is a, c, g, or t
  misc_feature (964)..(964): n is a, c, g, or t
  misc_feature (1014)..(1014): n is a, c, g, or t
  misc_feature (1020)..(1020): n is a, c, g, or t
  misc_feature (1035)..(1035): n is a, c, g, or t
  misc_feature (1041)..(1041): n is a, c, g, or t
  misc_feature (1050)..(1050): n is a, c, g, or t
  misc_feature (1067)..(1067): n is a, c, g, or t
  misc_feature (1082)..(1083): n is a, c, g, or t
  misc_feature (1090)..(1090): n is a, c, g, or t
  misc_feature (1108)..(1108): n is a, c, g, or t
  misc_feature (1111)..(1111): n is a, c, g, or t
  misc_feature (1113)..(1113): n is a, c, g, or t
  misc_feature (1120)..(1120): n is a, c, g, or t
  misc_feature (1125)..(1125): n is a, c, g, or t
  misc_feature (1145)..(1145): n is a, c, g, or t
  misc_feature (1151)..(1151): n is a, c, g, or t
  misc_feature (1154)..(1154): n is a, c, g, or t
  misc_feature (1159)..(1159): n is a, c, g, or t
  misc_feature (1167)..(1167): n is a, c, g, or t
aaatagagaaattactatgagaggatcgcatcaccatcaccatcacggatcctatttaggtgacactatagaatcgtcgacccacgcgtccgagatgatgacttttgatagtgaagttgagttgatgaaagttgccagagcacatcccaaagcaaagttggttttgcggattgccactgatgattccaaagcagtctgtcgtctcagtgtgaaattcggtgccacgctcagaaccagcaggctccttttggaacgggcgaaagagctaaatatcgatgttgttggtgtcagcttccatgtaggaagcggctgtaccgatcctgagaccttcgtgcaggcaatctctgatgcccgctgtgtttttgacatgggggctgaggttggtttcagcatgtatctgcttgatattggcggtggctttcctggatctgaggatgtgaaacttaaatttgaagagatcaccggcgtaatcaacccagcgttggacaaatactttccgtcagactctggagtgagaatcatagctgagcccggcagatactatgttgcatcagctttcacgcttgcagttaatatcattgccaagaaaattgtattaaaggaacagacgggctctgatgacgaagatgagtcgagtgagcagacctttatgtattatgtgaatgatggcgtctatggatcatttaattgcatactctatgaccacgcacatgtaaagccccttctgcaaaagagacctaaaccagatgagaagtattattcatccagcatatggggaccaacatgtgatggccctcgatcggantgttgagcgctgtgacctgcctgaaatgcatgtgggtgatgggatgctcctttgaaaacatgggcgcttaaccctgttgctgctgcctctacgttcaatggccttccaaangcccaacaatctactatgtgatgtccagggccctgcgtnggcaactcntggcagcaatttccaaaaacccccgacttcccccccgaaaataaaggaanagggangccccccccctgccntgtgtntttgggccnggggaaaaatgggaatnaaaaccccccaaaannaccctgngccttccgcctaaaaatntangngttaaanaaccnccccgggaaccttttaaacngcaaanttnacctngaaataangggaatttgggg

SEQ ID NO: 433 - DNA, 558 bp, Homo Sapiens
  misc_feature (1)..(1): n is a, c, g, or t
  misc_feature (513)..(514): n is a, c, g, or t
  misc_feature (517)..(517): n is a, c, g, or t
  misc_feature (523)..(523): n is a, c, g, or t
  misc_feature (529)..(529): n is a, c, g, or t
  misc_feature (540)..(542): n is a, c, g, or t
  misc_feature (544)..(544): n is a, c, g, or t
  misc_feature (549)..(550): n is a, c, g, or t
  misc_feature (552)..(553): n is a, c, g, or t
  misc_feature (555)..(558): n is a, c, g, or t
naattagagaaattactatgagaggatcgcatcaccatcaccatcacggatcctatttaggtgacactatagaatcgtcgacccacgcgtccgccaagatgccgcccaaaggaaaaagtggttctggaaaagcggggaaagggggagcagcctctgggagtgacagtgctgacaagaaggctcaaggtcccaaaggtggtggcaatgcagtaaaggtcagacacattctatgtgaaaaacatggcaaaatcatggaagccatggaaaagttaaagtctgggatgagattcaatgaagtggccgcacagtatagtgaagataaagccaggcaagggggtgacttgggttggatgaccagagggtccatggtgggaccatttcaagaagcagcatttgccttgcctgtaagtgggatggataagcctgtgtttacagacccaccggttaagacaaaatttggatatcatattattatggtcgaaggaagaaaataaaatcatatgaaagactgannaanaaaaanaaaaanaaaaaaaaaannnanaaaannannannnn

SEQ ID NO: 434 - DNA, 1220 bp, Homo Sapiens
  misc_feature (878)..(878): n is a, c, g, or t
  misc_feature (941)..(941): n is a, c, g, or t
  misc_feature (948)..(948): n is a, c, g, or t
  misc_feature (963)..(963): n is a, c, g, or t
  misc_feature (980)..(980): n is a, c, g, or t
  misc_feature (989)..(989): n is a, c, g, or t
  misc_feature (1026)..(1026): n is a, c, g, or t
  misc_feature (1034)..(1034): n is a, c, g, or t
  misc_feature (1043)..(1043): n is a, c, g, or t
  misc_feature (1097)..(1097): n is a, c, g, or t
  misc_feature (1120)..(1120): n is a, c, g, or t
  misc_feature (1131)..(1131): n is a, c, g, or t
  misc_feature (1143)..(1144): n is a, c, g, or t
  misc_feature (1150)..(1150): n is a, c, g, or t
  misc_feature (1153)..(1153): n is a, c, g, or t
  misc_feature (1165)..(1165): n is a, c, g, or t
  misc_feature (1174)..(1174): n is a, c, g, or t
  misc_feature (1177)..(1177): n is a, c, g, or t
  misc_feature (1181)..(1181): n is a, c, g, or t
  misc_feature (1183)..(1183): n is a, c, g, or t
  misc_feature (1185)..(1185): n is a, c, g, or t
  misc_feature (1189)..(1189): n is a, c, g, or t
  misc_feature (1193)..(1193): n is a, c, g, or t
  misc_feature (1197)..(1197): n is a, c, g, or t
  misc_feature (1200)..(1201): n is a, c, g, or t
  misc_feature (1206)..(1206): n is a, c, g, or t
  misc_feature (1208)..(1208): n is a, c, g, or t
  misc_feature (1212)..(1212): n is a, c, g, or t
atagagaattactatgagaggatcgcatcaccatcaccatcacggatcctatttaggtgacactatagaatcgtcgacccacgcgtccgacttcccctacagcaagcagagcaagatgaggaagaggggttccattgtgtgcaagctgctagcatccatgctggcgaaagcaggtttaactcacattatcactatggatcttcatcaaaaggaaatacaaggctttttcagctttcctgtggacaaccttagagcctcacctttcctgcttcagtatatccaggaagaaattccaaattacagaaatgcagtcattgtagctaagtctcctgatgctgcaaagagggcccagtcctatgcggagagactgcgtctgggtttggccgtcattcacggggaagctcagtgcacggaactggacatggacgatggtcgtcactccccgcctatggtcaaaaatgctactgtgcacccaggcctggagttgccattgatgatggccaaagagaagccaccgataactgtagttggagatgttggaggccgcatcgcaatcatcgtggatgacattattgacgatgtggagagttttgttgctgccgcggagatcctgaaagagagaggcgcctataagatctatgttatggccacccacggcatcctgtctgcagaggcccctcgcctgattgaggagtcctccgtagacgaggtggtggtgacgaatactgtccctcatgaggttcagaagctgcaatgtcccaagataaagactgtggatatcagtttgattctttctgaagccattcggagaatccacaatggagagtccatggcctaccttttccgaaacatcactgtggatgactagctttcacganggtctcgaccctggacctcctgagggaaacatggaaaaagcagtgccatgagtgatacagtgntttcctngcaagggaggactcnaaacagcctggagttanatatcttcnttttgcccggattgatggggaggagggattaaaaaantcaggaanaaaacaganctaatggaaaaaatatcataacatggccttacatgtctgctgtcatccaccccngttccttaaaagttctagctgcnttcttaaaaanaatctgaaaatnnttttgnatncctaaaaaggantttaagggnccntaangncntaancccnaaanggnncattnanttgnttcccccc

SEQ ID NO: 435 - DNA, 574 bp, Homo Sapiens
  misc_feature (3)..(3): n is a, c, g, or t
  misc_feature (6)..(7): n is a, c, g, or t
  misc_feature (10)..(10): n is a, c, g, or t
  misc_feature (19)..(19): n is a, c, g, or t
  misc_feature (27)..(28): n is a, c, g, or t
  misc_feature (39)..(39): n is a, c, g, or t
  misc_feature (53)..(53): n is a, c, g, or t
  misc_feature (59)..(59): n is a, c, g, or t
  misc_feature (63)..(63): n is a, c, g, or t
  misc_feature (68)..(68): n is a, c, g, or t
  misc_feature (74)..(74): n is a, c, g, or t
  misc_feature (80)..(80): n is a, c, g, or t
  misc_feature (96)..(96): n is a, c, g, or t
  misc_feature (121)..(121): n is a, c, g, or t
  misc_feature (139)..(139): n is a, c, g, or t
  misc_feature (165)..(165): n is a, c, g, or t
  misc_feature (184)..(184): n is a, c, g, or t
  misc_feature (366)..(366): n is a, c, g, or t
  misc_feature (442)..(442): n is a, c, g, or t
  misc_feature (451)..(451): n is a, c, g, or t
  misc_feature (467)..(467): n is a, c, g, or t
  misc_feature (541)..(541): n is a, c, g, or t
  misc_feature (546)..(546): n is a, c, g, or t
  misc_feature (549)..(549): n is a, c, g, or t
  misc_feature (552)..(552): n is a, c, g, or t
  misc_feature (558)..(559): n is a, c, g, or t
  misc_feature (561)..(561): n is a, c, g, or t
  misc_feature (563)..(564): n is a, c, g, or t
  misc_feature (566)..(566): n is a, c, g, or t
  misc_feature (569)..(569): n is a, c, g, or t
  misc_feature (573)..(573): n is a, c, g, or t
agnatnnaanagaattacntatggagnnggatggcctcnccatcaccattcanggaatnctantttangtgacnctatanaaatcgtcgacccacncgttccgccgaggatcgcacgcgangagacttctccgccgcanacgccgccgcgatgcgcgtacgtcgnctcctacctgctggctgcnctagggggcaactcctcccccagcgccaaggacatcaagaagatcttggacagcgtgggtatcgaggcggacgacgaccggctcaacaaggttatcagtgagctgaatggaaaaaacattgaagacgtcattgcccagggtattggcaagcttgccagtgtacctgctggtggggctgtagncgtctctgctgccccaggctctgcagcccctgctgctggttctgcccctgctgcagcagaggagaagaaagatganaagaaggangagtctgaatagtcanatgatgacatgggatttggcctttttgattaaattcctgctcccctgcaaataaagcctttttacacatctcanacaanaanaanaatacnnantnncntancaant

SEQ ID NO: 436 - DNA, 422 bp, Homo Sapiens
atagagagattactatgagaggatcgcatcaccatcaccatcacggatcctatttaggtgacactatagaatcgtcgacccacgcgtccgtgacgacctacgcacacgagaacatgcctctcgcaaaggatctccttcatccctctccagaagaggagaagaggaaacacaagaagaaacgcctggtgcagagccccaattcctacttcatggatgtgaaatgcccaggatgctataaaatcaccacggtctttagccatgcacaaacggtagttttgtgtgttggctgctccactgtcctctgccagcctacaggaggaaaagcaaggcttacagaaggatgttccttcaggaggaagcagcactaaaagcactctgagtcaagatgagtgggaaaccatctcaataaacacattttggat

SEQ ID NO: 437 - DNA, 1148 bp, Homo Sapiens
  misc_feature (1)..(2): n is a, c, g, or t
  misc_feature (886)..(886): n is a, c, g, or t
  misc_feature (962)..(962): n is a, c, g, or t
  misc_feature (965)..(965): n is a, c, g, or t
  misc_feature (1024)..(1024): n is a, c, g, or t
  misc_feature (1058)..(1058): n is a, c, g, or t
  misc_feature (1078)..(1078): n is a, c, g, or t
  misc_feature (1081)..(1081): n is a, c, g, or t
  misc_feature (1087)..(1087): n is a, c, g, or t
  misc_feature (1106)..(1106): n is a, c, g, or t
  misc_feature (1110)..(1110): n is a, c, g, or t
  misc_feature (1112)..(1112): n is a, c, g, or t
  misc_feature (1119)..(1119): n is a, c, g, or t
  misc_feature (1127)..(1129): n is a, c, g, or t
  misc_feature (1131)..(1131): n is a, c, g, or t
  misc_feature (1136)..(1137): n is a, c, g, or t
  misc_feature (1140)..(1140): n is a, c, g, or t
nnaatagagaaattactatgagaggatcgcatcaccatcaccatcacggatcctatttaggtgacactatagaatcgtcgacccacgcgtccgcccacgcgtccgcccacgcgtccgggttctgcttacccgaggccgctgctgtgcggagacccccgggtgaagccaccgtcatcatgtctgaccaggaggcaaaaccttcaactgaggacttgggggataagaaggaaggtgaatatattaaactcaaagtcattggacaggatagcagtgagattcacttcaaagtgaaaatgacaacacatctcaagaaactcaaagaatcatactgtcaaagacagggtgttccaatgaattcactcaggtttctctttgagggtcagagaattgctgataatcatactccaaaagaactgggaatggaggaagaagatgtgattgaagtttatcaggaacaaacggggggtcattcaacagtttagatattctttttattttttttcttttccctcaatccttttttatttttaaaaatagttcttttgtaatgtggtgttcaaaacggaattgaaaactggcaccccatctctttgaaacatctggtaatttgaattctagtgctcattattcattattgtttgttttcattgtgctgatttttggtgatcaagcctcagtccccttcatattaccctctcctttttaaaaattacgtgtgcacagagaggtcacctttttcaggacattgcattttcaggcttgtggtgataaataagatcgaccaatgcaagtgttcataatgactttccaattggccctgatgttctagcatgtgattacttcactcctggactgtgactttcagtgggagatggaagtttttcanagaactgaactgtggaaaaaatgacctttccttaacttgaagctacttttaaaatttgagggtctgggaccaaaanaanaaggaatatcaggttgaagtcaagatgacagataaggggaaaagtaatgactaactccnaagatggcttccctgaaaaaaaggcatttaaaanttttttaaaaatcttgtcanaanatcccnaaaaaagttctaattttcnttancnaattaanaaagcctnnncntgccnnaantggaatcc

SEQ ID NO: 438 - DNA, 1179 bp, Homo Sapiens
  misc_feature (884)..(884): n is a, c, g, or t
  misc_feature (886)..(886): n is a, c, g, or t
  misc_feature (926)..(926): n is a, c, g, or t
  misc_feature (935)..(935): n is a, c, g, or t
  misc_feature (941)..(941): n is a, c, g, or t
  misc_feature (944)..(944): n is a, c, g, or t
  misc_feature (960)..(960): n is a, c, g, or t
  misc_feature (982)..(982): n is a, c, g, or t
  misc_feature (984)..(984): n is a, c, g, or t
  misc_feature (991)..(991): n is a, c, g, or t
  misc_feature (1002)..(1002): n is a, c, g, or t
  misc_feature (1051)..(1051): n is a, c, g, or t
  misc_feature (1064)..(1064): n is a, c, g, or t
  misc_feature (1069)..(1069): n is a, c, g, or t
  misc_feature (1071)..(1071): n is a, c, g, or t
  misc_feature (1076)..(1076): n is a, c, g, or t
  misc_feature (1081)..(1081): n is a, c, g, or t
  misc_feature (1108)..(1108): n is a, c, g, or t
  misc_feature (1111)..(1111): n is a, c, g, or t
  misc_feature (1122)..(1122): n is a, c, g, or t
  misc_feature (1126)..(1127): n is a, c, g, or t
  misc_feature (1129)..(1129): n is a, c, g, or t
  misc_feature (1141)..(1141): n is a, c, g, or t
  misc_feature (1158)..(1158): n is a, c, g, or t
  misc_feature (1174)..(1174): n is a, c, g, or t
  misc_feature (1176)..(1177): n is a, c, g, or t
tagagaaattactatgagaggatcgcatcaccatcaccatcacggatcctatttaggtgacactatagaatcgtcgacccacgcgtccgccgcctcggggcacgggaagcacgtacccaagtcaggggcgaagctggacgcggccggcctgcaccaccaccgacacgtccaccaccacgtccaccacagcacagcccggcccaaggagcaggtggaggccgaggccacccgcagggcccagagcagcttcgcctggggcctggaaccacacagccatggggcaaggtcccgaggctactcagagagtgttggcgctgcccccaacgccagtgatggcctcgcccacagtgggaaggtgggcgtggcgtgcaaaagaaatgccaagaaggctgagtcggggaagagcgccagcaccgaggtgccaggtgcctcggaggatgcggagaagaaccagaaaatcatgcagtggatcattgaggggggataaaagaggaggagtgagcactggaaatactttttaaagaaaaaaaaacatgagggaataaaagaaattcctatcaaaaatcaaagtgaaataataccatccagcacttaactctcaggtcccaactaagtctggcctgagctaatttatttgagcgcagagtgtaaaatttaattcaaaatggtggctataatcactacagataaatttcatactcttttgtctttggagattccattgtggacagtaatacgcagttacagggtgtagtctgtttagattccgtagttcgtgggtatcagtttcggtagaggtgcagcatcgtgacacttttgctaacaggtaccacttctgatcaccctgtacatacatgagccgaaaggcacaatcactgtttcanantttaaaattattagtgtgttttgtttggtccaaaactganacaatcacntgacantcnccccgaggagaaaaanttttaaaaattaaaaataaaancnaaaaaanttttaaaattnaaaaacaaaattaaagtttaataaaaactttggtacaggaacttttttntaatatacatgtnttgantngttcntcganttttttaattaattttaatttgctgcnaanccaaaaactangganngncaaaaatatttntggcaaaggtttaattnttttaaaataataaantnntt

SEQ ID NO: 439 - DNA, 1150 bp, Homo Sapiens
  misc_feature (397)..(397): n is a, c, g, or t
  misc_feature (823)..(823): n is a, c, g, or t
  misc_feature (830)..(830): n is a, c, g, or t
  misc_feature (863)..(863): n is a, c, g, or t
  misc_feature (872)..(872): n is a, c, g, or t
  misc_feature (878)..(878): n is a, c, g, or t
  misc_feature (886)..(886): n is a, c, g, or t
  misc_feature (907)..(907): n is a, c, g, or t
  misc_feature (912)..(912): n is a, c, g, or t
  misc_feature (915)..(915): n is a, c, g, or t
  misc_feature (921)..(921): n is a, c, g, or t
  misc_feature (932)..(932): n is a, c, g, or t
  misc_feature (936)..(937): n is a, c, g, or t
  misc_feature (944)..(944): n is a, c, g, or t
  misc_feature (955)..(955): n is a, c, g, or t
  misc_feature (962)..(962): n is a, c, g, or t
  misc_feature (988)..(989): n is a, c, g, or t
  misc_feature (994)..(994): n is a, c, g, or t
  misc_feature (1002)..(1002): n is a, c, g, or t
  misc_feature (1013)..(1013): n is a, c, g, or t
  misc_feature (1017)..(1017): n is a, c, g, or t
  misc_feature (1033)..(1033): n is a, c, g, or t
  misc_feature (1046)..(1047): n is a, c, g, or t
  misc_feature (1071)..(1072): n is a, c, g, or t
  misc_feature (1077)..(1078): n is a, c, g, or t
  misc_feature (1088)..(1088): n is a, c, g, or t
  misc_feature (1093)..(1093): n is a, c, g, or t
  misc_feature (1100)..(1100): n is a, c, g, or t
  misc_feature (1102)..(1102): n is a, c, g, or t
  misc_feature (1104)..(1104): n is a, c, g, or t
  misc_feature (1107)..(1107): n is a, c, g, or t
  misc_feature (1110)..(1110): n is a, c, g, or t
  misc_feature (1113)..(1113): n is a, c, g, or t
  misc_feature (1115)..(1115): n is a, c, g, or t
  misc_feature (1118)..(1118): n is a, c, g, or t
  misc_feature (1128)..(1128): n is a, c, g, or t
  misc_feature (1141)..(1141): n is a, c, g, or t
  misc_feature (1148)..(1149): n is a, c, g, or t
tagagaaattactatgagaggatcgcatcaccatcaccatcacggatcctatttaggtgacactatagaatcgtcgacccacgcgtccggacagacccgcggggcaaacggactggggccaagagccgggagcgcgggcgcaaaggcaccagggcccgcccagggcgccgcgcagcacggccttgggggttctgcgggccttcgggtgcgcgtctcgcctctagccatggggtccgcagcgttggagatcctgggcctggtgctgtgcctggtgggctgggggggtctgatcctggcgtgcgggctgcccatgtggcaggtgaccgccttcctggaccacaacatcgtgacggcgcagaccacctggaaggggctgtggatgtcgtgcgtggtgcanagcaccgggcacatgcagtgcaaagtgtacgactcggtgctggctctgagcaccgaggtgcaggcggcgcgggcgctcaccgtgagcgccgtgctgctggcgttcgttgcgctcttcgtgaccctggcgggcgcgcagtgcaccacctgcgtggccccgggcccggccaaggcgcgtgtggccctcacgggaggcgtgctctacctgttttgcgggctgctggcgctcgtgccactctgctggttcgccaacattgtcgtccgcgagttttacgacccgtctgtgcccgtgtcgcagaagtacgagctgggcgcagcgctgtacatcggctgggcggccaccgcgctgctcatggtaggcggctgcctcttgtgctgcggcgcctgggtctgcaccggccgtcccgacctcagcttccccgtgaantactcancgccgcggcggcccacggccaccggcgactacnaacaagaanaactanttctgaanggcgctgggcaacggccgggnccccntcntgccanccacgcctgcnaagnnttggaanaaccctggggnaaccccnaatggaaccgcggctttcccccgggnnaacgnggcccccnagcttcctccnaaangttccgggtttttgcnccccaaacccggnntcctggaattcccctcctgccttnnccccnnaatttaaatntttcnctgcaanananccnggnccntnccntaaaaaaaanaaaaaaattttcnttttttnnc

SEQ ID NO: 440 - DNA, 1123 bp, Homo Sapiens
  misc_feature (779)..(779): n is a, c, g, or t
  misc_feature (936)..(936): n is a, c, g, or t
  misc_feature (948)..(948): n is a, c, g, or t
  misc_feature (959)..(959): n is a, c, g, or t
  misc_feature (964)..(964): n is a, c, g, or t
  misc_feature (971)..(971): n is a, c, g, or t
  misc_feature (980)..(980): n is a, c, g, or t
  misc_feature (993)..(993): n is a, c, g, or t
  misc_feature (1004)..(1004): n is a, c, g, or t
  misc_feature (1006)..(1006): n is a, c, g, or t
  misc_feature (1015)..(1015): n is a, c, g, or t
  misc_feature (1020)..(1020): n is a, c, g, or t
  misc_feature (1035)..(1035): n is a, c, g, or t
  misc_feature (1038)..(1038): n is a, c, g, or t
  misc_feature (1041)..(1041): n is a, c, g, or t
  misc_feature (1046)..(1046): n is a, c, g, or t
  misc_feature (1055)..(1055): n is a, c, g, or t
  misc_feature (1060)..(1060): n is a, c, g, or t
  misc_feature (1062)..(1062): n is a, c, g, or t
  misc_feature (1082)..(1083): n is a, c, g, or t
  misc_feature (1086)..(1088): n is a, c, g, or t
  misc_feature (1090)..(1090): n is a, c, g, or t
  misc_feature (1093)..(1094): n is a, c, g, or t
  misc_feature (1096)..(1096): n is a, c, g, or t
  misc_feature (1101)..(1102): n is a, c, g, or t
  misc_feature (1104)..(1105): n is a, c, g, or t
  misc_feature (1113)..(1113): n is a, c, g, or t
  misc_feature (1117)..(1117): n is a, c, g, or t
  misc_feature (1122)..(1122): n is a, c, g, or t
tagagaaattactatgagaggatcgcatcaccatcaccatcacggatcctatttaggtgacactatagaatcgtcgacccacgcgtccgggatcattgaacctatcatccagcatgcagactggttcttccctggggagatagagttcaacattactggcaattatgggagtccagtacacgtgaaccataatgccaactacagctcaatgccctccccagacatggaccctgctgaccggcgccagcccgagcaggcccgccggcccctcagtgtcgccacggataatatgatgctggagttttacaaaaaggatggcatgggtgtgagggtcatggacacaaactgggtggctcgaagaggctcctcggccggtcggaaagtgtcctgcgccccgccctccatgcagcctcccgccccgcccgccgagctggctgcgcccctgccttcgccgctgccggagcagcccctggacagccccgcggcccccgcgctctctccatccggcctgggcctccagcctgggcccgagcgcaccagcacaacaaaaagcaaggaactttctccaggctctgcacagaaaggaagtccaggctccagccagggcacagcctgtgcagggactcaaccaggggctcaacctggagctcagccgggcgccagccccagccccagccagccgcctgcagaccagagtcctcacaccctccggaaagtttcaaagaagctggcaccgattccacccaaggtcccctttggccagccgggggctatggcanaccagtccgctggccagccgtccccagtcagcctgtcccccaccccgcccagcaccccgtcaccctatggactgagctaccctcaggggtactccttggcctcgggccagctctccccagctgcagctcctcccctggcctctccttctgtctttanaagcactttgancaaatcgcggncccantcctaanccgcgaaanaaaactaatctgncgcctcctcancntcccaaagnaaacntctcgcctctaatcnaantcnaggangcccccagntaaangnatgtccctgggaaaacatgnntannntntgnnanatganngnncattttgnaaantggang

SEQ ID NO: 441 - DNA, 1179 bp, Homo Sapiens
  misc_feature (2)..(2): n is a, c, g, or t
  misc_feature (4)..(5): n is a, c, g, or t
  misc_feature (738)..(738): n is a, c, g, or t
  misc_feature (908)..(908): n is a, c, g, or t
  misc_feature (928)..(928): n is a, c, g, or t
  misc_feature (940)..(940): n is a, c, g, or t
  misc_feature (945)..(945): n is a, c, g, or t
  misc_feature (950)..(950): n is a, c, g, or t
  misc_feature (970)..(970): n is a, c, g, or t
  misc_feature (979)..(979): n is a, c, g, or t
  misc_feature (990)..(990): n is a, c, g, or t
  misc_feature (1001)..(1001): n is a, c, g, or t
  misc_feature (1013)..(1013): n is a, c, g, or t
  misc_feature (1019)..(1019): n is a, c, g, or t
  misc_feature (1042)..(1042): n is a, c, g, or t
  misc_feature (1047)..(1047): n is a, c, g, or t
  misc_feature (1053)..(1053): n is a, c, g, or t
  misc_feature (1055)..(1055): n is a, c, g, or t
  misc_feature (1059)..(1059): n is a, c, g, or t
  misc_feature (1070)..(1070): n is a, c, g, or t
  misc_feature (1075)..(1075): n is a, c, g, or t
  misc_feature (1086)..(1086): n is a, c, g, or t
  misc_feature (1089)..(1089): n is a, c, g, or t
  misc_feature (1094)..(1094): n is a, c, g, or t
  misc_feature (1097)..(1097): n is a, c, g, or t
  misc_feature (1107)..(1107): n is a, c, g, or t
  misc_feature (1112)..(1112): n is a, c, g, or t
  misc_feature (1128)..(1128): n is a, c, g, or t
  misc_feature (1133)..(1133): n is a, c, g, or t
  misc_feature (1137)..(1137): n is a, c, g, or t
  misc_feature (1153)..(1153): n is a, c, g, or t
  misc_feature (1160)..(1160): n is a, c, g, or t
  misc_feature (1168)..(1168): n is a, c, g, or t
anannagagaaattactatgagaggatcgcatcaccatcaccatcacggatcctatttaggtgacactatagaatcgtcgacccacgcgtccggggtgaaagctcatgaactcaaggagcacaacggacacatcacaggtattgactgggctcccaagagcgaccgcattgtcacttgtggggcagaccgcaatgcctatgtctggagtcagaaagatggtgtttggaagccaaccctggtgatcctgagaattaatcgcgcagctacttttgtgaagtggtcccccctagagaacaaatttgctgtgggaagtggagcacgactcatttctgtttgttactttgagtctgaaaatgactggtgggtgagcaagcacattaaaaagccgattcgctccacagtcctcagcttggattggcatcccaacaacgttttgctggcagcaggatcatgtgacttcaaatgcagagtgttttctgcctacattaaagaagtggatgaaaagccagccagcacgccctggggcagcaagatgccttttgggcagctgatgtcagagtttggtggcagtggcactggtggctgggtccacggggtaagcttctctgccagtgggagccgcctggcctgggtcagccacgacagcaccgtgtctgttgctgatgcctcaaaaagtgtgcaggtctcgactctgaagacagagttcctgccgctcctaagtgtgtcatttgtctcanagaacagcgtcgtggctgctggccatgactgctgcccaatgctctttaactacgatgaccgcggctgcctgaccttcgtctccaagttagatattccaaaacagagcatccaacgcaacatgtctgccatggaacgcttccgcaacatggacaagaaagccacaactgangaccgcacacggccttgganacgctgcaccanaatancatcnctcaagtctctatttatgangtggaaaancaaaattgtcncaaattttgcnctactggcatcnatgganccatgaaatttggggattcaaancctcnagtctncntccnggcctccgaanatggnaactgaatganccnccccntcnaaatgaaaantgggnccaacccacttttccnggccnaggnaagaaacccccccagnaaacctnaaaacatncccccaaggcc

SEQ ID NO: 442 - DNA, 1381 bp, Homo Sapiens
  misc_feature (1)..(1): n is a, c, g, or t
  misc_feature (15)..(15): n is a, c, g, or t
  misc_feature (900)..(900): n is a, c, g, or t
  misc_feature (1039)..(1039): n is a, c, g, or t
  misc_feature (1057)..(1057): n is a, c, g, or t
  misc_feature (1074)..(1075): n is a, c, g, or t
  misc_feature (1089)..(1089): n is a, c, g, or t
  misc_feature (1091)..(1091): n is a, c, g, or t
  misc_feature (1106)..(1106): n is a, c, g, or t
  misc_feature (1112)..(1113): n is a, c, g, or t
  misc_feature (1118)..(1118): n is a, c, g, or t
  misc_feature (1124)..(1124): n is a, c, g, or t
  misc_feature (1132)..(1132): n is a, c, g, or t
  misc_feature (1134)..(1134): n is a, c, g, or t
  misc_feature (1156)..(1156): n is a, c, g, or t
  misc_feature (1168)..(1168): n is a, c, g, or t
  misc_feature (1172)..(1172): n is a, c, g, or t
  misc_feature (1179)..(1179): n is a, c, g, or t
  misc_feature (1184)..(1184): n is a, c, g, or t
  misc_feature (1189)..(1189): n is a, c, g, or t
  misc_feature (1194)..(1194): n is a, c, g, or t
  misc_feature (1196)..(1196): n is a, c, g, or t
  misc_feature (1201)..(1201): n is a, c, g, or t
  misc_feature (1207)..(1207): n is a, c, g, or t
  misc_feature (1212)..(1212): n is a, c, g, or t
  misc_feature (1214)..(1214): n is a, c, g, or t
  misc_feature (1229)..(1229): n is a, c, g, or t
  misc_feature (1234)..(1234): n is a, c, g, or t
  misc_feature (1240)..(1240): n is a, c, g, or t
  misc_feature (1246)..(1246): n is a, c, g, or t
  misc_feature (1255)..(1255): n is a, c, g, or t
  misc_feature (1268)..(1268): n is a, c, g, or t
  misc_feature (1275)..(1275): n is a, c, g, or t
  misc_feature (1283)..(1283): n is a, c, g, or t
  misc_feature (1289)..(1289): n is a, c, g, or t
  misc_feature (1292)..(1292): n is a, c, g, or t
  misc_feature (1297)..(1297): n is a, c, g, or t
  misc_feature (1301)..(1301): n is a, c, g, or t
  misc_feature (1304)..(1304): n is a, c, g, or t
  misc_feature (1314)..(1314): n is a, c, g, or t
  misc_feature (1322)..(1322): n is a, c, g, or t
  misc_feature (1340)..(1342): n is a, c, g, or t
  misc_feature (1347)..(1347): n is a, c, g, or t
  misc_feature (1357)..(1357): n is a, c, g, or t
  misc_feature (1378)..(1378): n is a, c, g, or t
  misc_feature (1381)..(1381): n is a, c, g, or t
ntatagagaaattanctatgagaggatcgcatcaccatcaccatcacggatcctatttaggtgacactatagaatcgtcgacccacgcgtccgttgaggaactcctgaaggctcgagagaatccaagtgaagaggcacaaaacttggtggagttcacagatgaggagggatatggtcgttatctcgatctccatgactgttacctcaagtacattaacctgaaggcatctgagaagctggattatatcacatacctgtccatctttgaccaattatttgacattcctaaagaaaggaagaatgcagagtataagagatacctagagatgctgcttgagtaccttcaggattacacagatagagtgaagcctctccaagatcagaatgaactttttgggaagattcaggctgagtttgagaagaaatgggagaatgggacctttcctggatggccgaaagagacaagcagtgccctgacccatgctggagcccatcttgacctctctgcattctcctcctgggaggagttggcttctctgggtttggacagattgaaatctgctctcttagctttaggcttgaaatgtggcgggaccctagaagagcgagcccagagactattcagtaccaaaggaaagtccctggagtcacttgatacctctttgtttgccaaaaatcccaagtcaaagggcaccaagcgagacactgaaaggaacaaagacattgcttttctagaagcccagatctatgaatatgtagagattctcggggaacagcgacatctcactcatgaaaatgtacagcgcaagcaagccaggacaggagaagagcgagaagaagaggaagaagagcagatcagtgagagtgagagtgaagatgaagagaacgagatcatttacnaccccaaaaacctgccacttggctgggatggcaaacctattccctactggctgtataagcttcatggcctaaatatcaactacaactgtgagatttgtggaaactacacctaccgagggccccaagccttccagcgacnctttgctgaatggcgtcntgctcatggcatgaggnnttgggcatcccaancnctgctcctttgctangggacnnaaatngaaaangctgtccncntgggggcccaactgaaattgcnaaagcttccaancaangcccccngaccnggagnaaaantnaaaancccagngggangntgggaaaaaaaaaantccangatttnaaaaanagggccgcnccagggtgagggnaaacccncttttggncacccnccntcccnaaanttntttttttttncccccaancccttaaacctttttaannnccggnccaccccctnaaaaaacgcggcaaaaggggnaan

SEQ ID NO: 443 - DNA, 1151 bp, Homo Sapiens
  misc_feature (28)..(28): n is a, c, g, or t
  misc_feature (819)..(819): n is a, c, g, or t
  misc_feature (841)..(841): n is a, c, g, or t
  misc_feature (847)..(847): n is a, c, g, or t
  misc_feature (854)..(854): n is a, c, g, or t
  misc_feature (857)..(857): n is a, c, g, or t
  misc_feature (876)..(876): n is a, c, g, or t
  misc_feature (921)..(921): n is a, c, g, or t
  misc_feature (923)..(923): n is a, c, g, or t
  misc_feature (951)..(951): n is a, c, g, or t
  misc_feature (953)..(953): n is a, c, g, or t
  misc_feature (956)..(956): n is a, c, g, or t
  misc_feature (966)..(966): n is a, c, g, or t
  misc_feature (970)..(970): n is a, c, g, or t
  misc_feature (992)..(992): n is a, c, g, or t
  misc_feature (999)..(999): n is a, c, g, or t
  misc_feature (1018)..(1018): n is a, c, g, or t
  misc_feature (1025)..(1025): n is a, c, g, or t
  misc_feature (1029)..(1029): n is a, c, g, or t
  misc_feature (1049)..(1049): n is a, c, g, or t
  misc_feature (1054)..(1054): n is a, c, g, or t
  misc_feature (1060)..(1060): n is a, c, g, or t
  misc_feature (1064)..(1064): n is a, c, g, or t
  misc_feature (1069)..(1069): n is a, c, g, or t
  misc_feature (1079)..(1080): n is a, c, g, or t
  misc_feature (1088)..(1088): n is a, c, g, or t
  misc_feature (1094)..(1094): n is a, c, g, or t
  misc_feature (1097)..(1097): n is a, c, g, or t
  misc_feature (1099)..(1099): n is a, c, g, or t
  misc_feature (1101)..(1101): n is a, c, g, or t
  misc_feature (1104)..(1104): n is a, c, g, or t
  misc_feature (1107)..(1108): n is a, c, g, or t
  misc_feature (1111)..(1112): n is a, c, g, or t
  misc_feature (1116)..(1116): n is a, c, g, or t
  misc_feature (1120)..(1120): n is a, c, g, or t
  misc_feature (1127)..(1127): n is a, c, g, or t
  misc_feature (1131)..(1131): n is a, c, g, or t
  misc_feature (1136)..(1136): n is a, c, g, or t
  misc_feature (1144)..(1144): n is a, c, g, or t
  misc_feature (1147)..(1147): n is a, c, g, or t
caataaagatattaactatgagaggatngcatcaccatcaccatcacgggatcctatttaggtgacactatagaatcgtcgacccacgcgtccggagctgcgcctgacggtggcaccatgagcagctcaggtggggcgcccggggcgtccgccagctctgcgccgcccgcgcaggaagagggcatgacgtggtggtaccgctggctgtgtcgcctgtctggggtgctgggggcagtctcttgcgcgatctctggcctcttcaactgcatcaccatccaccctctgaacatcgcggccggcgtgtggatgatcatgaatgccttcatcttgttgctgtgtgaggcgcccttctgctgccagttcatcgagtttgcaaacacagtggcggagaaggtggaccggctgcgctcctggcagaaggctgtcttctactgcgggatggcggtcgttcccatcgtcatcagcctgaccctgaccacgctgctgggcaacgccatcgcctttgctacgggggtgctgtacggactctctgctctgggcaaaaagggcgatgcgatctcctatgccaggatccagcagcagaggcagcaggcggatgaggagaagctcgcggagaccctggagggggagctgtgaagggctgggcgcccctccctccctgtcccctcttctggctctgtgtgggtccaagtgaggcctggactgtccacgctgaggcacagcctggagaggggcctttgcacgtgtccctacacctggagtcctctgctcctttctccagactggcttaagccaggagccactggctgctggtgtganggtctgggctgctggacttgangcaaancctgcancanctgtgtggacactacccanccctactcctctgctgggtgggtctgcaaatctcacaccaaaaananggctgcctgtgacctgctgtgacctggnancancttcccctgnaaangctggtcctggcttgaagggangggcaantggaacctgccacttgggnactgaanaaangaactccccaactttttaanagggnaacccnaggnctggnaaacctgccnntgcaaaanctccantgntncnaanggnnaannccantgtnacctgcntttnaaaanccaaaggntcnaaag

SEQ ID NO: 444 - DNA, 1048 bp, Homo Sapiens
  misc_feature (1)..(1): n is a, c, g, or t
  misc_feature (3)..(3): n is a, c, g, or t
  misc_feature (843)..(843): n is a, c, g, or t
  misc_feature (889)..(889): n is a, c, g, or t
  misc_feature (901)..(901): n is a, c, g, or t
  misc_feature (906)..(906): n is a, c, g, or t
  misc_feature (910)..(910): n is a, c, g, or t
  misc_feature (912)..(912): n is a, c, g, or t
  misc_feature (930)..(930): n is a, c, g, or t
  misc_feature (938)..(938): n is a, c, g, or t
  misc_feature (943)..(943): n is a, c, g, or t
  misc_feature (954)..(954): n is a, c, g, or t
  misc_feature (970)..(970): n is a, c, g, or t
  misc_feature (988)..(988): n is a, c, g, or t
  misc_feature (992)..(992): n is a, c, g, or t
  misc_feature (997)..(997): n is a, c, g, or t
  misc_feature (1002)..(1002): n is a, c, g, or t
  misc_feature (1004)..(1004): n is a, c, g, or t
  misc_feature (1007)..(1007): n is a, c, g, or t
  misc_feature (1010)..(1010): n is a, c, g, or t
  misc_feature (1014)..(1014): n is a, c, g, or t
  misc_feature (1017)..(1017): n is a, c, g, or t
  misc_feature (1035)..(1036): n is a, c, g, or t
  misc_feature (1038)..(1038): n is a, c, g, or t
  misc_feature (1043)..(1044): n is a, c, g, or t
nantagagaaattactatgagaggatcgcatcaccatcaccatcacggatcctatttaggtgacactatagaatcgtcgacccacgcgtccgcagggacccagagccgaattcggaggatgtggaatgacactgtgaggaaacagacggagtcctccttcatggcgggtgacatcaacagcacccccaccctgaaccgaggtaccatggggaaccacctgctgaccaaccccgtgctgcagccccgtgggggcaccagtccctacaacaccctcatcgccgagtcagtgggcttcaatccctcctcgccccctgtcttcaactccccagggagctaccgggaacccaagcaccccttgggaggccgggaagcctgtggcatggacaccctgcccctgaacggcaacttcaataacagttactccttgcgaagtggggatttccctcccggggatgggggccctgagccgccccgaggccggaacctagccgatgcggcggcctttgagaagatgatcatctcagagctggtgcacaacaacctgcgggggagcagcagcgcggccaagggccctccaccgcctgagccccctgtgccacctgtgccagggggcgggggcgaggaagaggcgggcgggcccgggggtgctgaccgggccgagattgaacttctctataaggccctggaggagcctctgctgctgccccgggcccagtcggtgctgtaccagagcgatctggacgagtcggagagctgcacggccgaggacggcgccaccagccggcccctctcctcccctcctggccgggactccctctatgccagcggggccaacctgcgggnactcaccctcctacccggacagcagccctgaggggcccagtgaggnccttgcccccanccccntccngnaccccccggccccccccnaaatctantaaancttcgcgcccngccagcccttggtggncccggaaatcccctgcangggntactnaccangnggnggngtcntanccacaagggctacctggnnanccccnngcct

SEQ ID NO: 445 - DNA, 1262 bp, Homo Sapiens
  misc_feature (738)..(739): n is a, c, g, or t
  misc_feature (749)..(749): n is a, c, g, or t
  misc_feature (752)..(757): n is a, c, g, or t
  misc_feature (759)..(759): n is a, c, g, or t
  misc_feature (762)..(768): n is a, c, g, or t
  misc_feature (820)..(820): n is a, c, g, or t
  misc_feature (839)..(839): n is a, c, g, or t
  misc_feature (874)..(874): n is a, c, g, or t
  misc_feature (894)..(894): n is a, c, g, or t
  misc_feature (897)..(897): n is a, c, g, or t
  misc_feature (915)..(915): n is a, c, g, or t
  misc_feature (920)..(920): n is a, c, g, or t
  misc_feature (941)..(941): n is a, c, g, or t
  misc_feature (947)..(947): n is a, c, g, or t
  misc_feature (985)..(985): n is a, c, g, or t
  misc_feature (995)..(995): n is a, c, g, or t
  misc_feature (998)..(998): n is a, c, g, or t
  misc_feature (1015)..(1015): n is a, c, g, or t
  misc_feature (1024)..(1024): n is a, c, g, or t
  misc_feature (1041)..(1041): n is a, c, g, or t
  misc_feature (1050)..(1050): n is a, c, g, or t
  misc_feature (1062)..(1062): n is a, c, g, or t
  misc_feature (1072)..(1072): n is a, c, g, or t
  misc_feature (1078)..(1078): n is a, c, g, or t
  misc_feature (1082)..(1082): n is a, c, g, or t
  misc_feature (1089)..(1089): n is a, c, g, or t
  misc_feature (1107)..(1107): n is a, c, g, or t
  misc_feature (1122)..(1122): n is a, c, g, or t
  misc_feature (1130)..(1130): n is a, c, g, or t
  misc_feature (1134)..(1134): n is a, c, g, or t
  misc_feature (1138)..(1138): n is a, c, g, or t
  misc_feature (1142)..(1142): n is a, c, g, or t
  misc_feature (1145)..(1145): n is a, c, g, or t
  misc_feature (1159)..(1159): n is a, c, g, or t
  misc_feature (1163)..(1163): n is a, c, g, or t
  misc_feature (1165)..(1166): n is a, c, g, or t
  misc_feature (1191)..(1191): n is a, c, g, or t
  misc_feature (1207)..(1207): n is a, c, g, or t
  misc_feature (1211)..(1211): n is a, c, g, or t
  misc_feature (1217)..(1218): n is a, c, g, or t
  misc_feature (1233)..(1233): n is a, c, g, or t
  misc_feature (1237)..(1237): n is a, c, g, or t
  misc_feature (1241)..(1241): n is a, c, g, or t
  misc_feature (1243)..(1243): n is a, c, g, or t
tagagaaattactatgagaggatcgcatcaccatcaccatcacggatcctatttaggtgacactatagaatcgtcgacccacgcgtccgggctgccgaagatggcggaggtgcaggtcctggtgcttgatggtcgaggccatctcctgggccgcctggcggccatcgtggctaaacaggtactgctgggccggaaggtggtggtcgtacgctgtgaaggcatcaacatttctggcaatttctacagaaacaagttgaagtacctggctttcctccgcaagcggatgaacaccaacccttcccgaggcccctaccacttccgggcccccagccgcatcttctggcggaccgtgcgaggtatgctgccccacaaaaccaagcgaggccaggccgctctggaccgtctcaaggtgtttgacggcatcccaccgccctacgacaagaaaaagcggatggtggttcctgctgccctcaaggtcgtgcgtctgaagcctacaagaaagtttgcctatctggggcgcctggctcacgaggttggctggaagtaccaggcagtgacagccaccctggaggagaagaggaaagagaaagccaagatccactaccggaagaagaaacagctcatgaggctacggaaacaggccgagaagaacgtggagaagaaaattgacaaatacacagaggtcctcaagacccacggactcctggtctgagcccaataaagactgttaattcctcnnaaaaaaaaanaannnnnnanaannnnnnnaaaaagggcggccgctccctatagtgagtcgtattaagcttaattagctgancttggactcctgttgatanatccagtaatgacctcaaaactccatctggatttnttcaaaacgctcggttgccnccnggcgtttttattggtganaatcnaagctagcttggcgaaatttncagaanctaaaggaagctaaatggaaaaaaaaaatccctggatnaccaccgttnaanttatcccaatggcatcntaaaaaaanattttgaggcatttcantcagttgcncaatgtaccttnaaaccaaacngttcanctgnaaaatancggcctttttaaaacccntaaaaaaaaaaaccncaattttntccngccntttnttnaattttttcccccngaananncccctccgaaatttctttggcaatnaaaaaagggaactggnaaanggaaannttccccttttaaccntttncaananaaaaaaaattttttccctt

SEQ ID NO: 446 - DNA, 925 bp, Homo Sapiens
ctatgagaggatcgcatcaccatcaccatcacggatcctatttaggtgacactatagaatcgtcgacccacgcgtccgcccacgcgtccgcccacgcgtccggtaaggtttgctgcgccttgcttatttctgagtcccagaagctggcacattaccagagcaaaaaacatgccaacaaagtgaagagatacctagcaatccatggaatggagacattaaagggggaaacgaagaagctagactcagatcagaagagcagcagaagcaaagacaagaaccagtgctgccccatctgtaacatgaccttttcctcccctgtcgtggcccagtcgcactacctggggaagacccacgcaaagaacttaaagctgaagcagcagtccactaaggtggaagccttgcaccagaatagagagatgatagacccagacaagttctgcagcctctgccatgcaactttcaacgaccctgtcatggctcaacaacattatgtgggcaagaaacacagaaaacaggagaccaagctcaaactaatggcacgctatgggcggctggcggaccctgctgtcactgactttccagctggaaagggctacccctgcaaaacatgtaagatagtgctgaactccatagaacagtaccaagctcatgtcagcggcttcaaacacaagaaccagtcaccaaaaacagtggcatcatccctgggccagattccaatgcaaaggcaacccattcagaaagactcaaccaccttggaagactagaggtgattctgcccagcatcccatattgggccagccatgagccagcttcccgtgactgctcagcccttggctccctcttgctcgttgttctcaccaggaaagtacacgggcctgaggcaggattgggccacagacagcctctcattggtccgggctaattc

SEQ ID NO: 447 - DNA, 1280 bp, Homo Sapiens
  misc_feature (849)..(849): n is a, c, g, or t
  misc_feature (944)..(944): n is a, c, g, or t
  misc_feature (974)..(975): n is a, c, g, or t
  misc_feature (994)..(994): n is a, c, g, or t
  misc_feature (999)..(999): n is a, c, g, or t
  misc_feature (1008)..(1008): n is a, c, g, or t
  misc_feature (1014)..(1014): n is a, c, g, or t
  misc_feature (1017)..(1017): n is a, c, g, or t
  misc_feature (1035)..(1035): n is a, c, g, or t
  misc_feature (1040)..(1040): n is a, c, g, or t
  misc_feature (1051)..(1051): n is a, c, g, or t
  misc_feature (1067)..(1067): n is a, c, g, or t
  misc_feature (1073)..(1073): n is a, c, g, or t
  misc_feature (1089)..(1089): n is a, c, g, or t
  misc_feature (1091)..(1091): n is a, c, g, or t
  misc_feature (1093)..(1093): n is a, c, g, or t
  misc_feature (1095)..(1095): n is a, c, g, or t
  misc_feature (1103)..(1103): n is a, c, g, or t
  misc_feature (1106)..(1106): n is a, c, g, or t
  misc_feature (1133)..(1133): n is a, c, g, or t
  misc_feature (1135)..(1135): n is a, c, g, or t
  misc_feature (1139)..(1139): n is a, c, g, or t
  misc_feature (1144)..(1144): n is a, c, g, or t
  misc_feature (1146)..(1146): n is a, c, g, or t
  misc_feature (1150)..(1150): n is a, c, g, or t
  misc_feature (1158)..(1158): n is a, c, g, or t
  misc_feature (1165)..(1165): n is a, c, g, or t
  misc_feature (1168)..(1168): n is a, c, g, or t
  misc_feature (1172)..(1172): n is a, c, g, or t
  misc_feature (1176)..(1176): n is a, c, g, or t
  misc_feature (1183)..(1183): n is a, c, g, or t
  misc_feature (1186)..(1186): n is a, c, g, or t
  misc_feature (1190)..(1190): n is a, c, g, or t
  misc_feature (1194)..(1194): n is a, c, g, or t
  misc_feature (1212)..(1212): n is a, c, g, or t
  misc_feature (1215)..(1216): n is a, c, g, or t
  misc_feature (1218)..(1218): n is a, c, g, or t
  misc_feature (1234)..(1235): n is a, c, g, or t
  misc_feature (1238)..(1239): n is a, c, g, or t
  misc_feature (1249)..(1249): n is a, c, g, or t
  misc_feature (1251)..(1251): n is a, c, g, or t
  misc_feature (1254)..(1254): n is a, c, g, or t
  misc_feature (1267)..(1267): n is a, c, g, or t
attagagagaattactatgagaggatcgcatcaccatcaccatcacggatcctatttaggtgacactatagaatcgtcgacccacgcgtccggagcggtttgcacaatgtcggaaatggctgagttgtccgagctgtatgaagagagcagtgacctgcagatggatgtgatgcctggcgagggtgaccttccgcagatggaggtaggcagcgggagccgggagctatccctgcgtccctcccgcagcggggcccaacagctcgaggaggaaggcccaatggaggaggaggaggcccagccaatggcggcgccagaggggaaacggagccttgctaacgggcccaacgctggggagcagccaggccaggtggcgggcgcagacttcgagagcgaggacgagggcgaggaatttgatgactgggaggacgactacgactatcccgaagaggagcagctcagtggtgccggctacagagtatcagccgctcttgaagaagccgacaagatgtttctgagaacaagagaaccagccctggatggcgggtttcagatgcattatgagaagaccccgtttgatcagttagcttttatcgaagagcttttttcactgatggttgtcaatcgtctgaccgaagaactcggctgtgatgagattattgatagagagtagttagatgctgttaaaagaggaggaaactacttgaggagggacccaactttccgctatcttttgggttcattccaaatagttttgtgccattgaaaaacttgaccttcaaaaaaatttgtttttcagaatagaacacaataggacagtgactgcacagttgtgaaaaaggaagagaatcnttaaagaaaagaaaaaagattttaagaccgttgaaatcaattatcaagaacgtcctaaaacacctatggctttgactttgttattgatccaaatnattttccttgcattggggaaaatatctttnnatatttgtttgctgtaaanatggnttttgcaanaataantcntgaccaaaacaactgccnatacnaaaccccctgntactattttttatganaaaaantgttcccactaggacncntntntttgattnttngactgaaacttaaaaacttggaaaatntntttntgatntntcanccccattntcaaggntcntttncggnaaaaaanggngaanaacncaaattttttcccggggnttnntnttaaagggttccaaannccnnaatttttttnanttnttttttttttaanccctgtttttaaa

SEQ ID NO: 448 - DNA, 679 bp, Homo Sapiens
  misc_feature (2)..(2): n is a, c, g, or t
  misc_feature (302)..(302): n is a, c, g, or t
  misc_feature (310)..(310): n is a, c, g, or t
  misc_feature (365)..(365): n is a, c, g, or t
  misc_feature (399)..(399): n is a, c, g, or t
  misc_feature (405)..(405): n is a, c, g, or t
  misc_feature (443)..(443): n is a, c, g, or t
  misc_feature (518)..(518): n is a, c, g, or t
  misc_feature (527)..(527): n is a, c, g, or t
  misc_feature (535)..(535): n is a, c, g, or t
  misc_feature (547)..(547): n is a, c, g, or t
  misc_feature (550)..(550): n is a, c, g, or t
  misc_feature (558)..(558): n is a, c, g, or t
  misc_feature (578)..(578): n is a, c, g, or t
  misc_feature (581)..(581): n is a, c, g, or t
  misc_feature (583)..(583): n is a, c, g, or t
  misc_feature (605)..(605): n is a, c, g, or t
  misc_feature (612)..(612): n is a, c, g, or t
  misc_feature (618)..(618): n is a, c, g, or t
  misc_feature (623)..(623): n is a, c, g, or t
  misc_feature (629)..(630): n is a, c, g, or t
  misc_feature (632)..(632): n is a, c, g, or t
  misc_feature (637)..(637): n is a, c, g, or t
  misc_feature (641)..(641): n is a, c, g, or t
  misc_feature (645)..(645): n is a, c, g, or t
  misc_feature (650)..(650): n is a, c, g, or t
  misc_feature (652)..(652): n is a, c, g, or t
  misc_feature (655)..(655): n is a, c, g, or t
anattagaggagaattaactatgagaggatcgcatcaccatcaccatcacgggatcctatttaggatgacactatagaatcgtcgacccacgcgtccgggcggctgcagctccggtcgagccgcgcgcgctgcgaccccgctccgcagcccgctagtcgcccccgacccagcccagggccccggcgtggcccccgacccggcccccgcacccgccccgccgccgaccctatggagctgctggccgctgccttcagcgccgcctgcgccgtggaccacgacagttccacctcggaaagcgacncgcgcgantcggcggcgggacacctgcccggcagtgagtcgtcctccaccccgggaaatgggnccacgcccgaggagtggccggccctggccgacanccccancacgctcaccgaggccctgcggatgatccaccccattnccgccgactcctggagaaacctcattgaacaaataaggctcctgtatcaggaataccgagataaatcgactctcnaagaaatcnaaatcagngaggcaacaggntgnagaaatanaagacaataccaatgggtcnccngncagtgaggacaccccggaggangaatatnaagagnaggangaggannanccggncatnccancaaanangancactctgccccaaatctgcctgct

SEQ ID NO: 449 - DNA, 1174 bp, Homo Sapiens
  misc_feature (923)..(923): n is a, c, g, or t
  misc_feature (926)..(926): n is a, c, g, or t
  misc_feature (959)..(959): n is a, c, g, or t
  misc_feature (965)..(965): n is a, c, g, or t
  misc_feature (980)..(980): n is a, c, g, or t
  misc_feature (986)..(986): n is a, c, g, or t
  misc_feature (989)..(989): n is a, c, g, or t
  misc_feature (999)..(999): n is a, c, g, or t
  misc_feature (1002)..(1002): n is a, c, g, or t
  misc_feature (1014)..(1014): n is a, c, g, or t
  misc_feature (1018)..(1018): n is a, c, g, or t
  misc_feature (1020)..(1020): n is a, c, g, or t
  misc_feature (1028)..(1028): n is a, c, g, or t
  misc_feature (1033)..(1033): n is a, c, g, or t
  misc_feature (1044)..(1044): n is a, c, g, or t
  misc_feature (1050)..(1050): n is a, c, g, or t
  misc_feature (1053)..(1053): n is a, c, g, or t
  misc_feature (1063)..(1063): n is a, c, g, or t
  misc_feature (1066)..(1066): n is a, c, g, or t
  misc_feature (1068)..(1068): n is a, c, g, or t
  misc_feature (1079)..(1079): n is a, c, g, or t
  misc_feature (1097)..(1097): n is a, c, g, or t
  misc_feature (1105)..(1105): n is a, c, g, or t
  misc_feature (1107)..(1107): n is a, c, g, or t
  misc_feature (1123)..(1123): n is a, c, g, or t
  misc_feature (1125)..(1125): n is a, c, g, or t
  misc_feature (1137)..(1137): n is a, c, g, or t
  misc_feature (1140)..(1140): n is a, c, g, or t
  misc_feature (1145)..(1145): n is a, c, g, or t
  misc_feature (1157)..(1157): n is a, c, g, or t
  misc_feature (1162)..(1162): n is a, c, g, or t
  misc_feature (1165)..(1165): n is a, c, g, or t
  misc_feature (1167)..(1167): n is a, c, g, or t
  misc_feature (1171)..(1171): n is a, c, g, or t
  misc_feature (1173)..(1173): n is a, c, g, or t
caattagagaaattactatgagaggatcgcatcaccatcaccatcacggatcctatttaggtgacactatagaatcgtcgacccacgcgtccgtggagacccagtctgagccctctgagttagaactggacgatgtcgttatcaccaacccccacattgaggccattctggagaatgaagactggatcgaagatgcctcgggtctcatgtcccactgcattgccatcttgaagatttgtcacactctgacagagaagcttgttgccatgacaatgggctctggggccaagatgaagacttcagccagtgtcagcgacatcattgtggtggccaagcggatcagccccagggtggatgatgttgtgaagtcgatgtaccctccgttggaccccaaactcctggacgcacggacgactgccctgctcctgtctgtcagtcacctggtgctggtgacaaggaatgcctgccatctgacgggaggcctggactggattgaccagtctctgtcggctgctgaggagcatttggaagtccttcgagaagcagccctagcttctgagccagataaaggcctcccaggccctgaaggcttcctgcaggagcagtctgcaatttagtgcctacaggccagcagctagccatgaaggcccctgccgccatccctggatggctcagcttagccttctactttttcctatagagttagttgttctccacggctggagagttcagctgtgtgtgcatagtaaagcaggagatccccgtcagtttatgcctcttttgcagttgcaaactgtggctggtgagtggcagtctaatactacagttaggggagatgccattcactctctgcaagaggagtattgaaaactggtggactgtcagctttatttagctcacctagtgttttcaagaaaattganccnccgtctaaaaaatcaagaggtttcacattaaantaaaanttctggcctctctcnatcggncanaatggggggnaantctgaatctgcntttncnaaaaaganaatcnattgaactaantagggnttntttttttggnaananttgtacccccnccccggccggttcattanttgaatancngccgggcccggaggcncngggtcccccccnccntgcangttgggtttaanctaanaantnaaantna

SEQ ID NO: 450 - DNA, 1145 bp, Homo Sapiens
  misc_feature (887)..(887): n is a, c, g, or t
  misc_feature (913)..(913): n is a, c, g, or t
  misc_feature (945)..(945): n is a, c, g, or t
  misc_feature (1004)..(1004): n is a, c, g, or t
  misc_feature (1010)..(1010): n is a, c, g, or t
  misc_feature (1030)..(1030): n is a, c, g, or t
  misc_feature (1044)..(1044): n is a, c, g, or t
  misc_feature (1062)..(1062): n is a, c, g, or t
  misc_feature (1064)..(1066): n is a, c, g, or t
  misc_feature (1068)..(1068): n is a, c, g, or t
  misc_feature (1086)..(1086): n is a, c, g, or t
  misc_feature (1091)..(1091): n is a, c, g, or t
  misc_feature (1101)..(1101): n is a, c, g, or t
  misc_feature (1103)..(1103): n is a, c, g, or t
  misc_feature (1111)..(1111): n is a, c, g, or t
  misc_feature (1115)..(1115): n is a, c, g, or t
  misc_feature (1120)..(1120): n is a, c, g, or t
  misc_feature (1125)..(1125): n is a, c, g, or t
  misc_feature (1127)..(1127): n is a, c, g, or t
  misc_feature (1133)..(1133): n is a, c, g, or t
  misc_feature (1138)..(1138): n is a, c, g, or t
  misc_feature (1140)..(1140): n is a, c, g, or t
tagagaaattactatgagaggatcgcatcaccatcaccatcacggatcctatttaggtgacactatagaatcgtcgacccacgcgtccggccaagaggagatagatgtgtggacactggagcggaaaggagcattcagccgggaggctttctttggcggcaatggaaagattaaccttactgtgttcaaacttctccaggagcatcttggggaatttatattcctttgtgagaaatgttttgatcataagcctagaatgataagtaaaagaaataaagataattctactgcttgttctcacccggttacaaagcatgagtttgaagacaataagtgccttgtccacattttgcgagagacaacagtaaaatactccaaaatacgttcttttcatggtcagtgtcagcttgatttatgtcgacatgaagttcggtatggctgtttaagggaagatgagtgcttttatgcccatagtcttgtggaactgaaagtctggataatgcaaaatgaaacaggtatctcacatgatgctattgctcaagagtctaaacgatattggcagaatttggaagcaaatgtacctggagcgcaggtacttggtaatcaaataatgcctggatttcttaatatgaagataaagtttgtgtgcgcccagtgtctgagaaacggtcaagtcattgaaccagacaaaaacagaaaatattgtagtgcaaaagcaaggcattcgtggaccaaagaccggcgtgcgatgagagtgatgtctattgaacgtaagaagtggatgaacatccgtcctctccccacaaagaaacaaatgcctttacagtttgatctgtgcaaccatattgcttctgggaaaaaatgtcaatatgtgggaaactgttccnttgctcatagtcctgaggaaagagangtttggacttacatgaaggagaatgggatacnaagatatggagcaattttacgaactatggctcagagtccaaaaaatgaaaaaagtgaanacatanccgtccgtcaaaaaggaaangggaaacaattccntgccacaattatgctgantnnngnggacttccctgctggagnggggnaaactgcacngngaaaacanggcnggccntcccncnaaaacnaaaanangttcc

SEQ ID NO: 451 - DNA, 1145 bp, Homo Sapiens
  misc_feature (870)..(870): n is a, c, g, or t
  misc_feature (897)..(897): n is a, c, g, or t
  misc_feature (946)..(946): n is a, c, g, or t
  misc_feature (960)..(960): n is a, c, g, or t
  misc_feature (971)..(971): n is a, c, g, or t
  misc_feature (980)..(980): n is a, c, g, or t
  misc_feature (988)..(988): n is a, c, g, or t
  misc_feature (1006)..(1006): n is a, c, g, or t
  misc_feature (1020)..(1020): n is a, c, g, or t
  misc_feature (1025)..(1025): n is a, c, g, or t
  misc_feature (1062)..(1062): n is a, c, g, or t
  misc_feature (1073)..(1073): n is a, c, g, or t
  misc_feature (1084)..(1084): n is a, c, g, or t
  misc_feature (1089)..(1089): n is a, c, g, or t
  misc_feature (1095)..(1095): n is a, c, g, or t
  misc_feature (1098)..(1098): n is a, c, g, or t
  misc_feature (1110)..(1110): n is a, c, g, or t
  misc_feature (1123)..(1126): n is a, c, g, or t
  misc_feature (1128)..(1135): n is a, c, g, or t
  misc_feature (1137)..(1145): n is a, c, g, or t
tagagaaattactatgagaggatcgcatcaccatcaccatcacggatcctatttaggtgacactatagaatcgtcgacccacgcgtccgcccacgcgtccggtcagggcgcacaaaccccaggagagaaggcggaagcagcagcgactctaaaggcagccccaggctggctaaagcggttcctggtatggaaacctaggcccgcgagtgcccgggcccagcccggcctagttcaggaagcagctcagccccagggcagcacatcagagacaccatggaacacagccattcctctgccgtcgtgctgggaccagtctttcctgaccaatatcaccttcttgaaggttcttctctggttggtcctgctgggactgtttgtggaactggaatttggcctggcatattttgtcctgtccttgttctattggatgtacgtcgggacacgaggccctgaagagaagaaagagggagagaagagcgcctactctgtgttcaatccaggctgtgaagccatccagggcaccctgactgcagagcagttggagcgcgagttacagttgagacccctggcagggagataggacccagctgtgctgtcatgcagctaacctctgatgtggtcttcctcaccattggctatggatttgatttcaggtgtataggactaagggcagcttgcgggttagctctgtgactgcatagtttttctaccttctttccctgatcttttgctgccatttgatctttgatagttttggtgaaactctctaaaatacattcactgtgggtccgacgcaatttataaaaattatgtactcaagaagggagacctgtttgtttcatttctcatctgtttgggagatgagtttanagcactagaaaggcactggggaaaatnctcagcttaaaacatccagcagtttgaagtatgattaggtacatcaggnctgcattgtcaagnttctctttaantcttttaanatttatancaatttttttttttcccngaaaagtttaggtngcaantttggggttcctggttggtttttgttttgcttcccgnctttaaattcnttaattttcanccatnacgggnatngaaaaaaaaaantctttaaaccaannnnannnnnnnnannnnnnnnn

SEQ ID NO: 452 - DNA, 1233 bp, Homo Sapiens
  misc_feature (3)..(3): n is a, c, g, or t
  misc_feature (812)..(812): n is a, c, g, or t
  misc_feature (860)..(860): n is a, c, g, or t
  misc_feature (892)..(892): n is a, c, g, or t
  misc_feature (905)..(905): n is a, c, g, or t
  misc_feature (917)..(917): n is a, c, g, or t
  misc_feature (922)..(922): n is a, c, g, or t
  misc_feature (930)..(930): n is a, c, g, or t
  misc_feature (937)..(937): n is a, c, g, or t
  misc_feature (942)..(942): n is a, c, g, or t
  misc_feature (967)..(967): n is a, c, g, or t
  misc_feature (997)..(997): n is a, c, g, or t
  misc_feature (1007)..(1007): n is a, c, g, or t
  misc_feature (1018)..(1018): n is a, c, g, or t
  misc_feature (1021)..(1021): n is a, c, g, or t
  misc_feature (1023)..(1023): n is a, c, g, or t
  misc_feature (1029)..(1031): n is a, c, g, or t
  misc_feature (1033)..(1034): n is a, c, g, or t
  misc_feature (1045)..(1045): n is a, c, g, or t
  misc_feature (1058)..(1060): n is a, c, g, or t
  misc_feature (1069)..(1069): n is a, c, g, or t
  misc_feature (1074)..(1074): n is a, c, g, or t
  misc_feature (1076)..(1076): n is a, c, g, or t
  misc_feature (1079)..(1079): n is a, c, g, or t
  misc_feature (1081)..(1081): n is a, c, g, or t
  misc_feature (1085)..(1085): n is a, c, g, or t
  misc_feature (1097)..(1097): n is a, c, g, or t
  misc_feature (1107)..(1107): n is a, c, g, or t
  misc_feature (1116)..(1116): n is a, c, g, or t
  misc_feature (1122)..(1122): n is a, c, g, or t
  misc_feature (1128)..(1128): n is a, c, g, or t
  misc_feature (1135)..(1135): n is a, c, g, or t
  misc_feature (1143)..(1143): n is a, c, g, or t
  misc_feature (1163)..(1163): n is a, c, g, or t
  misc_feature (1166)..(1166): n is a, c, g, or t
  misc_feature (1188)..(1188): n is a, c, g, or t
  misc_feature (1191)..(1191): n is a, c, g, or t
  misc_feature (1194)..(1194): n is a, c, g, or t
  misc_feature (1196)..(1196): n is a, c, g, or t
  misc_feature (1210)..(1210): n is a, c, g, or t
  misc_feature (1221)..(1221): n is a, c, g, or t
  misc_feature (1224)..(1224): n is a, c, g, or t
cantagagaaattactatgagaggatcgcatcaccatcaccatcacggatcctatttaggtgacactatagaatcgtcgacccacgcgtccgtggcgatgcacaacaaggcggcgccgccgcagatcccggacacccggcgggagctggcggagctcgtgaagcggaagcaggagctggcggaaacattggcaaatttggagcgacagatctatgcttttgagggaagctacctggaagacactcagatgtatggcaatattattcgtggctgggatcggtatctgaccaaccaaaaaaactccaatagcaaaaatgatcgaaggaaccggaagtttaaggaagctgagcggctcttcagtaaatcctcggttacctcagcagctgcagtaagtgcattggcaggagttcaggaccagctcattgaaaagagggagccaggaagtgggacggaaagtgacacttctccagacttccacaatcaggaaaatgagcccagccaggaggaccctgaggatctggatggatctgtgcagggagtgaaacctcagaaggctgcttcttctacttcctcagggagtcaccacagcagccataaaaagcgaaagaataaaaaccggcacagcccgtctggcatgtttgattatgactttgagattgatctgaagttaaacaaaaaaccacgagctgactattagaagacacattagtgcagaagcttccaggctgtaaagccctgcttcccttctctgacctcacaaagataaacatcccttcacctgagttcgtggccatccacctctgctctcccanacccagtgcctgtgactttgagtagtttgttctaatgtggtgacaaanaagtcatttctgtaaaaattgggtcttacttntgtcattttttantaacaaactgcnggaanatcaaaanaatgttntaatncccggcaagttgctaaactggggcnttttcccccttcttaaaaaaagaatgttcnccccccaaanctgggttggcnccnanctttcnnntnngaaaacccctncaaaaaatgttcnnngggtttttnttttntngcngnaaantaaaaacccaanttcccctttncaaaagggngccggnaaaaanccgggcnatttcccnaaaagggtttaaggtttccnggntttcccccgggggttttaaccnaanttncnttgggggttttttntaagccttttnaanccaaaattt

SEQ ID NO: 453 - DNA, 1082 bp, Homo Sapiens
  misc_feature (699)..(699): n is a, c, g, or t
  misc_feature (843)..(843): n is a, c, g, or t
  misc_feature (871)..(872): n is a, c, g, or t
  misc_feature (894)..(894): n is a, c, g, or t
  misc_feature (902)..(902): n is a, c, g, or t
  misc_feature (907)..(907): n is a, c, g, or t
  misc_feature (911)..(911): n is a, c, g, or t
  misc_feature (940)..(940): n is a, c, g, or t
  misc_feature (946)..(946): n is a, c, g, or t
  misc_feature (952)..(952): n is a, c, g, or t
  misc_feature (955)..(955): n is a, c, g, or t
  misc_feature (961)..(961): n is a, c, g, or t
  misc_feature (980)..(980): n is a, c, g, or t
  misc_feature (989)..(989): n is a, c, g, or t
  misc_feature (995)..(997): n is a, c, g, or t
  misc_feature (1006)..(1006): n is a, c, g, or t
  misc_feature (1013)..(1013): n is a, c, g, or t
  misc_feature (1036)..(1036): n is a, c, g, or t
  misc_feature (1038)..(1038): n is a, c, g, or t
  misc_feature (1040)..(1040): n is a, c, g, or t
  misc_feature (1056)..(1056): n is a, c, g, or t
  misc_feature (1079)..(1079): n is a, c, g, or t
tagagagattactatgagaggatcgcatcaccatcaccatcacggatcctatttaggtgacactatagaatcgtcgacccacgcgtccgcggacgcgtgggttaagcccgggctcgcgctctcggaccgtgctttcgccgcctgggagccgtccggcgcagcagtttctaggtccccactgtccccgccgtcccgccccttcgcgtcccgggaaccggctggcttccgagccgcactcgccgatcctccaggcatgccccgctacgagctggctttaatcctgaaagccatgcagcggccagagactgctgctactttgaaacgtacgatagaggccctgatggacagaggagcaatagtgagggacttggaaaacctgggtgaacgagcgcttccttataggatctctgcccacagtcagcagcacaacagaggcgggtatttcttggtggatttttatgcacccaccgcagctgttgaaagcatggtggagcacttgtctcgagatatagatgtgattagagggaatattgtcaaacaccctctgacccaggaactaaaagaatgtgaagggattgtcccagtcccactcgcagaaaaattatattccacaaagaagaggaagaagtgagaagattcgccagattttagccttatatgtaattccttcacatttgggcagcatggacgagaaggaanaatttgcaagtttggcctttatataagcatgtgttgcaggtgctgtttgatttttctaaggtatttttagccccttgatcccctttgcttgcgagaggtggggaactgctcactgacagcttctctgtaacctgcagtaccagnggatcattcttgattttgttttcattanngtcatttcttttgtcattgaangacttttnccccnttanaacagtaaacacccattttttttgaaaancaaaancttaanaanacctcntgggaattggggaaactantccattccnccctgnnntaaccttgnggaaaanaaaaattgacaaaccaattgtantnantggaaaaattttttgntttgagaaaaaaaacttggattngag

SEQ ID NO: 454 - DNA, 1020 bp, Homo Sapiens
  misc_feature (3)..(3): n is a, c, g, or t
  misc_feature (672)..(672): n is a, c, g, or t
  misc_feature (678)..(678): n is a, c, g, or t
  misc_feature (723)..(723): n is a, c, g, or t
  misc_feature (791)..(791): n is a, c, g, or t
  misc_feature (803)..(803): n is a, c, g, or t
  misc_feature (807)..(807): n is a, c, g, or t
  misc_feature (812)..(812): n is a, c, g, or t
  misc_feature (827)..(827): n is a, c, g, or t
  misc_feature (834)..(834): n is a, c, g, or t
  misc_feature (847)..(848): n is a, c, g, or t
  misc_feature (860)..(860): n is a, c, g, or t
  misc_feature (864)..(864): n is a, c, g, or t
  misc_feature (877)..(877): n is a, c, g, or t
  misc_feature (889)..(890): n is a, c, g, or t
  misc_feature (902)..(902): n is a, c, g, or t
  misc_feature (906)..(906): n is a, c, g, or t
  misc_feature (911)..(911): n is a, c, g, or t
  misc_feature (930)..(930): n is a, c, g, or t
  misc_feature (933)..(933): n is a, c, g, or t
  misc_feature (936)..(936): n is a, c, g, or t
  misc_feature (957)..(958): n is a, c, g, or t
  misc_feature (966)..(967): n is a, c, g, or t
  misc_feature (971)..(971): n is a, c, g, or t
  misc_feature (985)..(985): n is a, c, g, or t
  misc_feature (1000)..(1002): n is a, c, g, or t
  misc_feature (1006)..(1020): n is a, c, g, or t
atngagaaattactatgagaggatcgcatcaccatcaccatcacggatcctatttaggtgacactatagaatcgtcgacccacgcgtccgcccacgcgtccgcccacgcgtccgatcaggtgaagctgactctagactcagaggaagaaggacccctggaggaatgcttggcctacctgactgcccgtttgccccagggatcgctggtcccctacatgcccaacgctgtggagcaggccagtgaggctgtatacaaactcgctgaatcagggtcttctttggggaaaaaggtggcaggtgccctacagaccattgagacctccctggctcagtacagcctcacccagctctgtgtgggcttcaacgggggcaaagactgcactgccctcctgcacctcttccatgcagctgtgcagaggaaattacctgatgttccaaaccccctccagatcctgtatatccgcagcatctcccctttccctgagctggaacagtttctacaggacactatcaagaggtataatctgcagatgttggaagctgagggcagcatgaagcaggccctgggtgaactgcaggcacggcacccccagctggaggctgtccttatgggcacccgccggactgacccctactcctgtagcctctgccctttcagccccactgacccangctggnccgcattcatgcgcatcaacccactgctggactggacctacaganacatctgggattttctgcgtcagctgtttgtcccatactgtatcctgtatgaccgaagatacacatcnctggggaagtcngganaatancgtggggaacccggncctgaantgcctgaacccannaagaaaccccanatancgtccagcctatntactgggaaaannaaaaaaaaagancggnaaatnccccccaatgacctccccnccntangaggggggggaaagaaacccnncctaaggnnaaanctgggaaaaaaacngggcctctccctggnnnaaannnnnnnnnnnnnnn

SEQ ID NO: 455 - DNA, 938 bp, Homo Sapiens
  misc_feature (2)..(2): n is a, c, g, or t
  misc_feature (5)..(6): n is a, c, g, or t
  misc_feature (8)..(8): n is a, c, g, or t
  misc_feature (17)..(17): n is a, c, g, or t
  misc_feature (24)..(24): n is a, c, g, or t
  misc_feature (428)..(428): n is a, c, g, or t
  misc_feature (431)..(431): n is a, c, g, or t
  misc_feature (443)..(443): n is a, c, g, or t
  misc_feature (582)..(582): n is a, c, g, or t
  misc_feature (596)..(596): n is a, c, g, or t
  misc_feature (606)..(606): n is a, c, g, or t
  misc_feature (708)..(708): n is a, c, g, or t
  misc_feature (712)..(713): n is a, c, g, or t
  misc_feature (732)..(732): n is a, c, g, or t
  misc_feature (737)..(737): n is a, c, g, or t
  misc_feature (748)..(748): n is a, c, g, or t
  misc_feature (759)..(759): n is a, c, g, or t
  misc_feature (762)..(762): n is a, c, g, or t
  misc_feature (777)..(777): n is a, c, g, or t
  misc_feature (798)..(798): n is a, c, g, or t
  misc_feature (805)..(805): n is a, c, g, or t
  misc_feature (808)..(808): n is a, c, g, or t
  misc_feature (834)..(834): n is a, c, g, or t
  misc_feature (847)..(847): n is a, c, g, or t
  misc_feature (850)..(850): n is a, c, g, or t
  misc_feature (852)..(852): n is a, c, g, or t
  misc_feature (869)..(869): n is a, c, g, or t
  misc_feature (874)..(874): n is a, c, g, or t
  misc_feature (877)..(877): n is a, c, g, or t
  misc_feature (884)..(885): n is a, c, g, or t
  misc_feature (887)..(887): n is a, c, g, or t
  misc_feature (891)..(891): n is a, c, g, or t
  misc_feature (894)..(894): n is a, c, g, or t
  misc_feature (913)..(913): n is a, c, g, or t
  misc_feature (927)..(927): n is a, c, g, or t
  misc_feature (932)..(932): n is a, c, g, or t
  misc_feature (937)..(937): n is a, c, g, or t
cnaannanaatagaganattactntgagaggatcgcatcaccatcaccatcacggatcctatttaggtgacactatagaatcgtcgacccacgcgtccggcgctgaggctgctggaggcgcgggccgggcggtgcgcactgcgggcgcatccctgccccggcgccgtccgtgcccgcgggacctgacagccgggtcagagggcgaagctgtgctcaggcccgggctggacgcagagccagagctgtccccagaggagcagagggtcctggaaaggaagctgaaaaaggaacggaagaaagaggagaggcagcgtctgcgggaggcaggccttgtggcccagcacccgcctgccaggcgctcgggggccgaactggccctggactacctctgcagatgggcccaaaagcacaagaactggaggtttcanaanacgaggcagacntggctcctgctgcacatgtatgacagtgacaaggtgtgtgcacggcggggcaggcacgtccccccgggggctgaggttcccgatgagcacttctccaccctgctggcctacctggaggggctgcagggccgggcccganagctgacggtgcanaaggcggaanccctgatgcgggagctggatgaggagggctctgatccccccctgccggggagggcccagcgcatccgacaggtgctgcagctgctctcctagtgggtttcancgcnnggcggggcccgctgcccantgcanggctgcctcanaccacacaggntgncaacttccttccggncggtggtggtccggggttcancaagcanggncaaccggctgaaccaaaggtcttttnaaactcctccggntgntngggggcccggggaatcnccaancanccaaaanncntcgnaanggcccccttttccttcctnccaaaacccctccnttggncccgnt

SEQ ID NO: 456 - DNA, 1091 bp, Homo Sapiens
  misc_feature (2)..(2): n is a, c, g, or t
  misc_feature (687)..(687): n is a, c, g, or t
  misc_feature (718)..(718): n is a, c, g, or t
  misc_feature (744)..(744): n is a, c, g, or t
  misc_feature (803)..(803): n is a, c, g, or t
  misc_feature (835)..(835): n is a, c, g, or t
  misc_feature (839)..(839): n is a, c, g, or t
  misc_feature (856)..(856): n is a, c, g, or t
  misc_feature (859)..(859): n is a, c, g, or t
  misc_feature (866)..(866): n is a, c, g, or t
  misc_feature (878)..(878): n is a, c, g, or t
  misc_feature (880)..(880): n is a, c, g, or t
  misc_feature (887)..(887): n is a, c, g, or t
  misc_feature (889)..(889): n is a, c, g, or t
  misc_feature (900)..(900): n is a, c, g, or t
  misc_feature (926)..(926): n is a, c, g, or t
  misc_feature (929)..(929): n is a, c, g, or t
  misc_feature (934)..(934): n is a, c, g, or t
  misc_feature (936)..(936): n is a, c, g, or t
  misc_feature (955)..(957): n is a, c, g, or t
  misc_feature (974)..(974): n is a, c, g, or t
  misc_feature (979)..(979): n is a, c, g, or t
  misc_feature (983)..(983): n is a, c, g, or t
  misc_feature (991)..(991): n is a, c, g, or t
  misc_feature (995)..(996): n is a, c, g, or t
  misc_feature (1023)..(1024): n is a, c, g, or t
  misc_feature (1031)..(1032): n is a, c, g, or t
  misc_feature (1035)..(1035): n is a, c, g, or t
  misc_feature (1071)..(1071): n is a, c, g, or t
  misc_feature (1073)..(1074): n is a, c, g, or t
  misc_feature (1082)..(1085): n is a, c, g, or t
  misc_feature (1088)..(1088): n is a, c, g, or t
cnaatagagaaattactatgagaggatcgcatcaccatcaccatcacggatcctatttaggtgacactatagaatcgtcgacccacgcgtccggcaccgcgtctccagcgatcccggatccactgcgctgccaggggcctgggggtgggtctcttgctgtctctgcgacgacatccttacgtttcggcactctaatgctgggtttgtgcgtgtgtgtctgcttagcggtctagcgggctgttaggctccctcgcccccagctccttggctcgctcagctcctccaccgcagcccagcagtgagacgcgcgcgcagccagctccccacgagatggaacagaccgaagtgctgaagccacggaccctggctgatctgatccgcatcctgcaccagctctttgccggcgatgaggtcaatgtagaggaggtgcaggccatcatggaagcctacgagagcgaccccaccgagtgggcaatgtacgccaagttcgaccagtacaggtatacccgaaatcttgtggatcaaggaaatggaaaatttaatctgatgattctctgttggggtgaaggacatggcagcagtattcatgatcataccaactcccactgctttctgaagatgctacagggaaatctaaaggagacattatttgcctggcctgacaaaaaatccaatgagatggtcaanaagtctgaaaaagtcttgagggaaaaaccantgtgcctacatcaatgattccattgncttacatcgagtaaagaacattcagccatacggaaacctgctgtgagcctttcacttgntacagttccaccttttgatacatgccatgccntttnaatcaaggaacaggaanatnaaaaacnaagtcccaaagnanattccanantaaatttggantcaaaaactccaaatggcaacttccnggnctcgntngaaaacaaactaaggggcnnncaaacccttctgaaggntttantttnaaggttcncctnnaagtttgcccttggaaacaaaaaagcnnacctacnncgngctaatcccagaaaaaatactttaaaataacccaantnnttaaaatnnnnttnaag

SEQ ID NO: 457 - DNA, 788 bp, Homo Sapiens
  misc_feature (1)..(1): n is a, c, g, or t
  misc_feature (527)..(527): n is a, c, g, or t
  misc_feature (630)..(631): n is a, c, g, or t
  misc_feature (661)..(661): n is a, c, g, or t
  misc_feature (699)..(699): n is a, c, g, or t
  misc_feature (708)..(708): n is a, c, g, or t
  misc_feature (714)..(714): n is a, c, g, or t
  misc_feature (734)..(734): n is a, c, g, or t
  misc_feature (736)..(737): n is a, c, g, or t
  misc_feature (741)..(741): n is a, c, g, or t
  misc_feature (746)..(746): n is a, c, g, or t
  misc_feature (759)..(759): n is a, c, g, or t
  misc_feature (763)..(763): n is a, c, g, or t
  misc_feature (767)..(767): n is a, c, g, or t
  misc_feature (773)..(775): n is a, c, g, or t
  misc_feature (778)..(778): n is a, c, g, or t
  misc_feature (780)..(780): n is a, c, g, or t
  misc_feature (788)..(788): n is a, c, g, or t
naatagagaaattactatgagaggatcgcatcaccatcaccatcacgggatcctatttaggtgacactatagaatcgtcgacccacgcgtccgcggacgcgtgggaccttacccggatcccctacccagctggaactctccctaaccccctgcttcctcaccctctgcacgagaacgaagttcttcgtcaccagctctttgctgccccttaccgggacctgccggcctccctttctgccccgatgtcagcagctcatcagctgcaggccatgcacgcacagtcagctgagctgcagcgcttggcgctggaacagcagcagtggctgcatgcccatcacccgctgcacagtgtgccgctgcctgcccaggaggactactacagtcacctgaagaaggaaagcgacaagccactgtagaacctgcgatcaagagagcaccatggctcctacattggaccttggagcacccccaccctccccccaccgtgcccttggcctgccacccagagccaagagggtgctgctcanttgcagggcctccgcagctggacagagagtgggggagggagggacagacagaaggccaaggcccgatgtggtgtgcagaggtggggaggtggcgaggatgggnnacagaaagcgcaacagaattcttggaccangtctctcttccttgtcccccctgcttttctcctccccnatgcccaanccctgnggccgcccgcccctcccccngnnccgnttggngtgaattaatttnatcnggtnaaaatnnngantntttttgcn

SEQ ID NO: 458 - DNA, 1254 bp, Homo Sapiens
  misc_feature (1)..(2): n is a, c, g, or t
  misc_feature (816)..(816): n is a, c, g, or t
  misc_feature (834)..(834): n is a, c, g, or t
  misc_feature (862)..(862): n is a, c, g, or t
  misc_feature (868)..(868): n is a, c, g, or t
  misc_feature (926)..(926): n is a, c, g, or t
  misc_feature (933)..(933): n is a, c, g, or t
  misc_feature (938)..(938): n is a, c, g, or t
  misc_feature (948)..(948): n is a, c, g, or t
  misc_feature (959)..(959): n is a, c, g, or t
  misc_feature (1022)..(1022): n is a, c, g, or t
  misc_feature (1025)..(1025): n is a, c, g, or t
  misc_feature (1031)..(1031): n is a, c, g, or t
  misc_feature (1043)..(1043): n is a, c, g, or t
  misc_feature (1053)..(1053): n is a, c, g, or t
  misc_feature (1069)..(1069): n is a, c, g, or t
  misc_feature (1075)..(1076): n is a, c, g, or t
  misc_feature (1083)..(1083): n is a, c, g, or t
  misc_feature (1087)..(1087): n is a, c, g, or t
  misc_feature (1097)..(1097): n is a, c, g, or t
  misc_feature (1101)..(1101): n is a, c, g, or t
  misc_feature (1109)..(1110): n is a, c, g, or t
  misc_feature (1115)..(1115): n is a, c, g, or t
  misc_feature (1118)..(1118): n is a, c, g, or t
  misc_feature (1129)..(1129): n is a, c, g, or t
  misc_feature (1131)..(1131): n is a, c, g, or t
  misc_feature (1142)..(1142): n is a, c, g, or t
  misc_feature (1146)..(1146): n is a, c, g, or t
  misc_feature (1153)..(1153): n is a, c, g, or t
  misc_feature (1180)..(1181): n is a, c, g, or t
  misc_feature (1183)..(1183): n is a, c, g, or t
  misc_feature (1187)..(1188): n is a, c, g, or t
  misc_feature (1194)..(1194): n is a, c, g, or t
  misc_feature (1201)..(1201): n is a, c, g, or t
  misc_feature (1215)..(1215): n is a, c, g, or t
  misc_feature (1222)..(1222): n is a, c, g, or t
  misc_feature (1226)..(1227): n is a, c, g, or t
  misc_feature (1232)..(1232): n is a, c, g, or t
  misc_feature (1245)..(1245): n is a, c, g, or t
  misc_feature (1248)..(1248): n is a, c, g, or t
  misc_feature (1253)..(1253): n is a, c, g, or t
nnaatagagaaattactatgagaggatcgcatcaccatcaccatcacggatcctatttaggtgacactatagaatcgtcgacccacgcgtccgtccagagagccatggccgccctgcgtgtcctgctgtcctgcgcccgcggcccgctgaggcccccggttcgctgtcccgcctggcgtcccttcgcctcgggtgctaactttgagtacatcatcgcagaaaaaagagggaagaataacaccgtggggttgatccaactgaaccgccccaaggccctcaatgcactttgcgatggcctgattgacgagctcaaccaggccctgaagatcttcgaggaggacccggccgtgggggccattgtcctcaccggcggggataaggcctttgcagctggagctgatatcaaggaaatgcagaacctgagtttccaggactgttactccagcaagttcttgaagcactgggaccacctcacccaggtcaagaagccagtcatcgctgctgtcaatggctatgcctttggcgggggctgtgagcttgccatgatgtgtgatatcatctatgccggtgagaaggcccagtttgcacagccggagatcttaataggaaccatcccaggtgcgggcggcacccagagactcacccgtgctgttgggaagtcgctggcgatggagatggtcctcaccggtgaccggatctcagcccaggacgccaagcaagcaggtcttgtcagcaagatttgtcctgttgagacactggtggaagaagccatccagtgtgcagaaaaaattgccagcaattctaaaattgtagtancgatggccaaagaatcantgaatgcagctttttgaaatgacattancagaangaagtaagttggaaaaaaaactcttttattcaacctttgccactgatgaccggaaaanaagggantgacngcgtttgtgnaaaaaaaaaanggccaaacttcaaagaccagtgaaaaacagcttgcccctgcttcacaactctgctttggaaanganaaagtnccacctgtcaanttttaaaaanaagtaaaatcatcctntttttnnaaaaaanaatnttccgggggnggcnattccctnnccaantgntggggggggcngnggcccaaactnttcnagggaangaaaaaccttttttcacccaaaccttnnangggnnctggantggaaanccctttttaaattnaaaaatntggnnaaaanaccccccctggcnccnttggna

SEQ ID NO: 459 - DNA, 1117 bp, Homo Sapiens
  misc_feature (869)..(869): n is a, c, g, or t
  misc_feature (881)..(881): n is a, c, g, or t
  misc_feature (896)..(896): n is a, c, g, or t
  misc_feature (912)..(912): n is a, c, g, or t
  misc_feature (952)..(952): n is a, c, g, or t
  misc_feature (954)..(954): n is a, c, g, or t
  misc_feature (980)..(980): n is a, c, g, or t
  misc_feature (997)..(997): n is a, c, g, or t
  misc_feature (1010)..(1010): n is a, c, g, or t
  misc_feature (1015)..(1015): n is a, c, g, or t
  misc_feature (1029)..(1029): n is a, c, g, or t
  misc_feature (1033)..(1033): n is a, c, g, or t
  misc_feature (1048)..(1048): n is a, c, g, or t
  misc_feature (1055)..(1055): n is a, c, g, or t
  misc_feature (1059)..(1060): n is a, c, g, or t
  misc_feature (1062)..(1062): n is a, c, g, or t
  misc_feature (1070)..(1070): n is a, c, g, or t
  misc_feature (1078)..(1078): n is a, c, g, or t
  misc_feature (1083)..(1083): n is a, c, g, or t
  misc_feature (1085)..(1085): n is a, c, g, or t
  misc_feature (1090)..(1091): n is a, c, g, or t
  misc_feature (1093)..(1093): n is a, c, g, or t
  misc_feature (1105)..(1105): n is a, c, g, or t
  misc_feature (1115)..(1115): n is a, c, g, or t
  misc_feature (1117)..(1117): n is a, c, g, or t
caatagagagattactatgagaggatcgcatcaccatcaccatcacggatcctatttaggtgacactatagaatcgtcgacccacgcgtccgcccacgcgtccgcccacctaaaggtcggctctgctgccgacatccccatcaacatctcagagacggatctcagcctgctgacggccactgtggtcccgccctcgggccgggaggagccctgtttgctgaagcggctgcgtaatggccacgtggggatttcattcgtgcccaaggagacgggggagcacctggtgcatgtgaagaaaaatggccagcacgtggccagcagccccatcccggtggtgatcagccagtcggaaattggggatgccagtcgtgttcgggtctctggtcagggccttcacgaaggccacacctttgagcctgcagagtttatcattgatacccgcgatgcaggctatggtgggctcagcctgtccattgagggccccagcaaggtggacatcaacacagaggacctggaggacgggacgtgcagggtcacctactgccccacagagccaggcaactacatcatcaacatcaagtttgccgaccagcacgtgcctggcagccccttctctgtgaaggtgacaggcgagggccgggtgaaagagagcatcacccgcaggcgtcgggctccttcagtggccaacgttggtagtcattgtgacctcagcctgaaaatccctgaaattagcatccaggatatgacagcccaggtgaccagcccatcgggcaagacccatgaggccgagatcgtggaaaggggagaaccacacctactgcatccgctttgttcccgctgagatgggcacacacacagtcagcgtgaantacaagggccancacgtgcctgggaanccccttccaatttcancgtggggcccctaggggaaagggggaacccacaaggtccnancttgggggccctggcctgaaaaaaanttaaacctgaaatgccnaccccaaattcantatcntggaacccggaaantggngctggaagccctggnccattgntttnnanggccccancaaggttnaaatntnttttnnanaaccccaaagancgcctccttngn

SEQ ID NO: 460 - DNA, 1245 bp, Homo Sapiens
  misc_feature (4)..(4): n is a, c, g, or t
  misc_feature (831)..(831): n is a, c, g, or t
  misc_feature (858)..(858): n is a, c, g, or t
  misc_feature (865)..(865): n is a, c, g, or t
  misc_feature (884)..(884): n is a, c, g, or t
  misc_feature (901)..(901): n is a, c, g, or t
  misc_feature (921)..(921): n is a, c, g, or t
  misc_feature (931)..(931): n is a, c, g, or t
  misc_feature (934)..(934): n is a, c, g, or t
  misc_feature (971)..(971): n is a, c, g, or t
  misc_feature (974)..(974): n is a, c, g, or t
  misc_feature (993)..(993): n is a, c, g, or t
  misc_feature (997)..(997): n is a, c, g, or t
  misc_feature (1002)..(1002): n is a, c, g, or t
  misc_feature (1004)..(1004): n is a, c, g, or t
  misc_feature (1017)..(1018): n is a, c, g, or t
  misc_feature (1020)..(1020): n is a, c, g, or t
  misc_feature (1027)..(1027): n is a, c, g, or t
  misc_feature (1035)..(1035): n is a, c, g, or t
  misc_feature (1044)..(1044): n is a, c, g, or t
  misc_feature (1047)..(1047): n is a, c, g, or t
  misc_feature (1061)..(1061): n is a, c, g, or t
  misc_feature (1063)..(1063): n is a, c, g, or t
  misc_feature (1070)..(1071): n is a, c, g, or t
  misc_feature (1084)..(1084): n is a, c, g, or t
  misc_feature (1097)..(1097): n is a, c, g, or t
  misc_feature (1105)..(1105): n is a, c, g, or t
  misc_feature (1114)..(1115): n is a, c, g, or t
  misc_feature (1117)..(1117): n is a, c, g, or t
  misc_feature (1123)..(1123): n is a, c, g, or t
  misc_feature (1128)..(1128): n is a, c, g, or t
  misc_feature (1133)..(1133): n is a, c, g, or t
  misc_feature (1135)..(1135): n is a, c, g, or t
  misc_feature (1138)..(1138): n is a, c, g, or t
  misc_feature (1157)..(1157): n is a, c, g, or t
  misc_feature (1159)..(1160): n is a, c, g, or t
  misc_feature (1178)..(1180): n is a, c, g, or t
  misc_feature (1183)..(1183): n is a, c, g, or t
  misc_feature (1185)..(1185): n is a, c, g, or t
  misc_feature (1198)..(1199): n is a, c, g, or t
  misc_feature (1208)..(1208): n is a, c, g, or t
  misc_feature (1218)..(1219): n is a, c, g, or t
  misc_feature (1228)..(1228): n is a, c, g, or t
  misc_feature (1234)..(1235): n is a, c, g, or t
ctantagagaaattactatgagaggatcgcatcaccatcaccatcacggatcctatttaggtgacactatagaatcgtcgacccacgcgtccggctacatcattctgtacaactaccgccatggtggccgccaggggcagataatctataactggcagggtgcccagtctacccaggatgaggtcgctgcatctgccatcctgactgctcagctggatgaggagctgggaggtacccctgtccagagccgtgtggtccaaggcaaggagcccgcccacctcatgagcctgtttggtgggaagcccatgatcatctacaagggcggcacctcccgcgagggcgggcagacagcccctgccagcacccgcctcttccaggtccgcgccaacagcgctggagccacccgggctgttgaggtattgcctaaggctggtgcactgaactccaacgatgcctttgttctgaaaaccccctcagccgcctacctgtgggtgggtacaggagccagcgaggcagagaagacgggggcccaggagctgctcagggtgctgcgggcccaacctgtgcaggtggcagaaggcagcgagccagatggcttctgggaggccctgggcgggaaggctgcctaccgcacatccccacggctgaaggacaagaagatggatgcccatcctcctcgcctctttgcctgctccaacaagattggacgttttgtgatcgaagaggttcctggtgagctcatgcaggaagacctggcaacggatgacgtcatgcttctggacacctgggaccaggtctttgtctgggttggaaaggattctcaagaagaanaaagacagaagccttgacttctgctangcggtanatcgagacggacccagccnaatcgggatcggcggancccccatcaccgtggtgaancaaggctttnaancctccctcctttgtgggcctggttccttggctgggangangaattactggtcttgggancccnttggnanagggccatggctnnanctggctntccttgangaggggcanggncccacccatgtcancnggtcaanngcctttttgaaantgttcctttcccncaaaaagnccttaaaannanaaaaanaactntgccnanaanggggggggggggggggggntnntttcttttttttttttannntancnaaaaaaaaccctnnaaaaatttnaaaacctttnnaaattttcnaaaagnncgggtttggg

SEQ ID NO: 461 - DNA, 1295 bp, Homo Sapiens
  misc_feature (1043)..(1043): n is a, c, g, or t
  misc_feature (1049)..(1049): n is a, c, g, or t
  misc_feature (1051)..(1051): n is a, c, g, or t
  misc_feature (1060)..(1060): n is a, c, g, or t
  misc_feature (1067)..(1067): n is a, c, g, or t
  misc_feature (1082)..(1082): n is a, c, g, or t
  misc_feature (1096)..(1096): n is a, c, g, or t
  misc_feature (1104)..(1104): n is a, c, g, or t
  misc_feature (1111)..(1111): n is a, c, g, or t
  misc_feature (1128)..(1128): n is a, c, g, or t
  misc_feature (1136)..(1136): n is a, c, g, or t
  misc_feature (1150)..(1150): n is a, c, g, or t
  misc_feature (1173)..(1173): n is a, c, g, or t
  misc_feature (1178)..(1178): n is a, c, g, or t
  misc_feature (1180)..(1180): n is a, c, g, or t
  misc_feature (1183)..(1183): n is a, c, g, or t
  misc_feature (1192)..(1192): n is a, c, g, or t
  misc_feature (1195)..(1196): n is a, c, g, or t
  misc_feature (1199)..(1199): n is a, c, g, or t
  misc_feature (1205)..(1205): n is a, c, g, or t
  misc_feature (1214)..(1214): n is a, c, g, or t
  misc_feature (1231)..(1231): n is a, c, g, or t
  misc_feature (1240)..(1240): n is a, c, g, or t
  misc_feature (1242)..(1242): n is a, c, g, or t
  misc_feature (1254)..(1254): n is a, c, g, or t
  misc_feature (1261)..(1261): n is a, c, g, or t
  misc_feature (1267)..(1267): n is a, c, g, or t
  misc_feature (1271)..(1271): n is a, c, g, or t
  misc_feature (1274)..(1274): n is a, c, g, or t
  misc_feature (1278)..(1278): n is a, c, g, or t
  misc_feature (1285)..(1286): n is a, c, g, or t
  misc_feature (1295)..(1295): n is a, c, g, or t
tagagaaattactatgagaggatcgcatcaccatcaccatcacggatcctatttaggtgacactatagaatcgtcgacccacgcgtccgcccacgcgtccgcccacgcgtccgcccacgcgtccgcttactacgatgttttgggggtcaaacccaatgctactcaggaagaattgaaaaaggcttataggaaactggctttgaagtaccatcctgataagaacccaaatgaaggagagaagtttaaacagatttctcaagcttacgaagttctctctgatgcaaagaaaagggaattatatgacaaaggaggagaacaggcaattaaagagggtggagcaggtggcggttttggctcccccatggacatctttgatatgttttttggaggaggaggaaggatgcagagagaaaggagaggtaaaaatgttgtacatcagctctcagtaaccctagaagacttatataatggtgcaacaagaaaactggctctgcaaaagaatgtgatttgtgacaaatgtgaaggtagaggaggtaagaaaggagcagtagagtgctgtcccaattgccgaggtactggaatgcaaataagaattcatcagataggacctggaatggttcagcaaattcagtctgtgtgcatggagtgccagggccatggggagcggatcagtcctaaagatagatgtaaaagctgcaacggaaggaagatagttcgagagaagaaaattttagaagttcatattgacaaaggcatgaaagatggccagaagataacattccatggtgaaggagaccaagaaccaggactggagccaggcgatattatcattgtgttagatcagaaggaccatgctgtttttactcgacgaggagaagacctttttcatgtgtatggacatacagctcgttgaagcactgtgtggcttccaaaaccaatatctactcttgacaaccgaaccatcgtcatcacctctcatccaggtcaaattgtcaagcatggaaatatcaagtgggtactaaatgaaggcatgccaattttcntaaacntntgaaaaggncccctancctccaatttaaggnaactttcctgaaanggctttcncccccgnaaaactgtctttgctgnaaaccccncccccaaaggaagnaatggaaaaaaccgttgaaaggncccantnaanctggggacnttnntcnatccgnaaaaaccgnccccctcctgggaaacntttgggggngnaacccccccccnagggggntccggnccanccnttanggcccgnnaaacccccn

SEQ ID NO: 462 - DNA, 1176 bp, Homo Sapiens
  misc_feature (943)..(943): n is a, c, g, or t
  misc_feature (996)..(996): n is a, c, g, or t
  misc_feature (1016)..(1016): n is a, c, g, or t
  misc_feature (1027)..(1027): n is a, c, g, or t
  misc_feature (1052)..(1052): n is a, c, g, or t
  misc_feature (1066)..(1066): n is a, c, g, or t
  misc_feature (1089)..(1089): n is a, c, g, or t
  misc_feature (1093)..(1093): n is a, c, g, or t
  misc_feature (1097)..(1097): n is a, c, g, or t
  misc_feature (1099)..(1099): n is a, c, g, or t
  misc_feature (1106)..(1106): n is a, c, g, or t
  misc_feature (1115)..(1115): n is a, c, g, or t
  misc_feature (1129)..(1130): n is a, c, g, or t
  misc_feature (1134)..(1134): n is a, c, g, or t
  misc_feature (1137)..(1138): n is a, c, g, or t
  misc_feature (1147)..(1147): n is a, c, g, or t
  misc_feature (1149)..(1149): n is a, c, g, or t
  misc_feature (1162)..(1162): n is a, c, g, or t
  misc_feature (1167)..(1167): n is a, c, g, or t
  misc_feature (1171)..(1171): n is a, c, g, or t
  misc_feature (1175)..(1176): n is a, c, g, or t
aattagaggaaattactatgagaggatcgcatcaccatcaccatcacggatcctatttaggtgacactatagaatcgtcgacccacgcgtccgctttgaacgcagtcgccctacagccgctgattccccccgcatcgcctcccgtggaagcccaggcccgcttcgcagctttctccctttgtctcataaccatgtccaccaacgagaatgctaatacaccagctgcccgtcttcacagattcaagaacaagggaaaagacagtacagaaatgaggcgtcgcagaatagaggtcaatgtggagctgaggaaagctaagaaggatgaccagatgctgaagaggagaaatgtaagctcatttcctgatgatgctacttctccgctgcaggaaaaccgcaacaaccagggcactgtaaattggtctgttgatgacattgtcaaaggcataaatagcagcaatgtggaaaatcagctccaagctactcaagctgccaggaaactactttccagagaaaaacagccccccatagacaacataatccgggctggtttgattccgaaatttgtgtccttcttgggcagaactgattgtagtcccattcagtttgaatctgcttgggcactcactaacattgcttctgggacatcagaacaaaccaaggctgtggtagatggaggtgccatcccagcattcatttctctgttggcatctccccatgctcacatcagtgaacaagctgtctgggctctaggaaacattgcaggtgatggctcagtgttccgagacttggttattaagtacggtgcagttgacccactgttggctctccttgcagttcctgatatgtcatctttagcatgtggctacttacgtaatcttacctggacactttctaatctttgccgcaacaagaatcctgcacccccgatagatgctgttgacanattcttcctaccttagttcggctctgcatcatgatgatccaaagtgttagcanaaacctgctgggctatttcnaccttactganggccaaaggaacgaattggcatggnggtgaaaacagganttgggccccacttgggaacttcnagancttngnaattgcnattgggacnctgccctaaaaccnnaggnaanntgtcctggnanaatgaaaaactcnggtgngatngagnn

SEQ ID NO: 463 - DNA, 970 bp, Homo Sapiens
  misc_feature (1)..(1): n is a, c, g, or t
  misc_feature (716)..(716): n is a, c, g, or t
  misc_feature (824)..(824): n is a, c, g, or t
  misc_feature (828)..(828): n is a, c, g, or t
  misc_feature (838)..(838): n is a, c, g, or t
  misc_feature (850)..(850): n is a, c, g, or t
  misc_feature (862)..(862): n is a, c, g, or t
  misc_feature (866)..(866): n is a, c, g, or t
  misc_feature (870)..(870): n is a, c, g, or t
  misc_feature (876)..(876): n is a, c, g, or t
  misc_feature (910)..(910): n is a, c, g, or t
  misc_feature (921)..(921): n is a, c, g, or t
  misc_feature (923)..(923): n is a, c, g, or t
  misc_feature (926)..(926): n is a, c, g, or t
  misc_feature (928)..(928): n is a, c, g, or t
  misc_feature (935)..(935): n is a, c, g, or t
  misc_feature (938)..(938): n is a, c, g, or t
  misc_feature (946)..(946): n is a, c, g, or t
  misc_feature (949)..(950): n is a, c, g, or t
  misc_feature (953)..(953): n is a, c, g, or t
  misc_feature (955)..(956): n is a, c, g, or t
  misc_feature (962)..(962): n is a, c, g, or t
  misc_feature (970)..(970): n is a, c, g, or t
nagagaaattactatgagaggatcgcatcaccatcaccatcacggatcctatttaggtgacactatagaatcgtcgacccacgcgtccgcccacgcgtccgcggacgcgtgggccggcgaagaactggacaagctctggcgggagttcctgcatcacaaagagaaagttcacgagtacaacgtcctgctggagaccctgagcaggaccgaagaaatccacgagaacgtcattagcccctcggacctgagcgacatcaagggcagcgtcctgcacagcaggcacacggagctgaaggagaagctgcgcagcatcaaccagggcctggaccgcctgcgcagggtcagccaccagggctacagcactgaggctgagttcgaggagcccagggtgattgacctgtgggacctggcgcagtccgccaacctcacggacaaggagctggaggcgttccgggaggagctcaagcacttcgaagccaaaatcgagaagcacaaccactaccagaagcagctggagattgcgcacgagaagctgaggcacgcagagagcgtgggcgacggcgagcgtgtgagccgcagccgcgagaagcacgccctgctggaggggcggaccaaggagctgggctacacggtgaagaagcatctgcaggacctgtccggcaggatctccagagctcggcacaacgaactctgaaggcactggggagcccagcccnggcagggaaaaaggccagcgtgaaggacctgggctcttggccgtggcattttccgtggaacagcccgcccttcagggtggctggggctggcacggggtgtccaggcangaangattgttttntggtgactgcancccctgccgtcncganacanggcttnggtgggtggtaacattttggttctgaaaatcggncccaacttttnantgnangggcttnggntttccctncannatnanngtgggnattccccn

SEQ ID NO: 464 - DNA, 892 bp, Homo Sapiens
tatgagaggtcgcatcaccatcaccatcacggatcctatttaggtgacactatagaatcgtcgacccacgcgtccgcccacgcgtccggaactagcgggttgctaaccacagggccgatgctgccaagggtcctggcggcagagaccacgtcccagcaggagcggctgcaggccatcgcagagaagcggaagcggcaggcggagatcgagaacaagcgccggcagctggaggacgagcggaggcagctgcagcacctgaagtccaaggcactgcgggagcgctggctgctggaggggacgccgtcctcggcctcagagggggatgaggacctgaggaggcagatgcaggacgacgagcagaagacacggctgctggaggactcggtgtccaggttggagaaggaaattgaggtgctggagcgtggagactccgccccagccactgccaaggagaacgcggcggccccgagcccagtccgggccccagccccgagtccagccaaggaggagcgcaagacagaggtggtgatgaattcacagcagacgccggtgggcacgcccaaagacaagcgagtctccaacacgcccctgaggacggttgacggctcccccatgatgaaggcagtggtccatgctgtggacggcaccgccgagaacgggatccaccccctgagctcctccgaggtggacgaactcatccacaaagcggacgaggtcacgctgagcgaggcagggtccacggccggggcggcagagacccggggggctgtggagggggcagcccggaccacgccctcccggcgggagatcaccggtgtgcaggcacagccaggcgaggccacgtccggcccgccggggatccagcccggccaggagcccccggtcacaatga

SEQ ID NO: 465 - DNA, 1267 bp, Homo Sapiens
  misc_feature (867)..(867): n is a, c, g, or t
  misc_feature (916)..(916): n is a, c, g, or t
  misc_feature (931)..(931): n is a, c, g, or t
  misc_feature (933)..(933): n is a, c, g, or t
  misc_feature (950)..(950): n is a, c, g, or t
  misc_feature (954)..(954): n is a, c, g, or t
  misc_feature (956)..(956): n is a, c, g, or t
  misc_feature (1002)..(1002): n is a, c, g, or t
  misc_feature (1013)..(1013): n is a, c, g, or t
  misc_feature (1021)..(1021): n is a, c, g, or t
  misc_feature (1029)..(1029): n is a, c, g, or t
  misc_feature (1037)..(1037): n is a, c, g, or t
  misc_feature (1047)..(1047): n is a, c, g, or t
  misc_feature (1056)..(1056): n is a, c, g, or t
  misc_feature (1058)..(1058): n is a, c, g, or t
  misc_feature (1068)..(1068): n is a, c, g, or t
  misc_feature (1071)..(1071): n is a, c, g, or t
  misc_feature (1080)..(1080): n is a, c, g, or t
  misc_feature (1082)..(1082): n is a, c, g, or t
  misc_feature (1091)..(1091): n is a, c, g, or t
  misc_feature (1100)..(1100): n is a, c, g, or t
  misc_feature (1107)..(1107): n is a, c, g, or t
  misc_feature (1124)..(1124): n is a, c, g, or t
  misc_feature (1127)..(1127): n is a, c, g, or t
  misc_feature (1134)..(1134): n is a, c, g, or t
  misc_feature (1138)..(1138): n is a, c, g, or t
  misc_feature (1142)..(1142): n is a, c, g, or t
  misc_feature (1148)..(1149): n is a, c, g, or t
  misc_feature (1151)..(1151): n is a, c, g, or t
  misc_feature (1162)..(1163): n is a, c, g, or t
  misc_feature (1184)..(1184): n is a, c, g, or t
  misc_feature (1190)..(1190): n is a, c, g, or t
  misc_feature (1204)..(1204): n is a, c, g, or t
  misc_feature (1206)..(1206): n is a, c, g, or t
  misc_feature (1209)..(1209): n is a, c, g, or t
  misc_feature (1212)..(1212): n is a, c, g, or t
  misc_feature (1224)..(1224): n is a, c, g, or t
  misc_feature (1227)..(1227): n is a, c, g, or t
  misc_feature (1232)..(1233): n is a, c, g, or t
  misc_feature (1249)..(1250): n is a, c, g, or t
  misc_feature (1261)..(1262): n is a, c, g, or t
  misc_feature (1264)..(1267): n is a, c, g, or t
tagagaaattactatgagaggatcgcatcaccatcaccatcacggatcctatttaggtgacactatagaatcgtcgacccacgcgtccgaggactccaaggcggagcaggccaaagtgaagaaggcccttctgcagaaaaatgtagagtgtgcccgtgtgtatgccgagaacgccatccgcaagaagaacgaaggtgtgaactggcttcggatggcgtcccgcgtagacgcagtggcctccaaggtgcagacagctgtgactatgaagggggtgaccaagaatatggcccaggtgaccaaagccctggacaaggccctgagcaccatggacctgcagaaggtctcctcagtgatggacaggttcgagcagcaggtgcagaacctggacgtccatacatcggtgatggaggactccatgagctcggccaccaccctgaccacgccgcaggagcaggtggacagcctcatcatgcagatcgccgaggagaatggcctggaggtgctggaccagctcagccagctgcccgagggcgcctctgccgtgggcgagagctctgtgcgcagccaggaggaccagctgtcacggaggttggccgccttgaggaactagccgtgccccgccggtgtgcaccgcctctgccccgtgatgtgctggaaggctcctgtcctctccccaccgcgtcttgcctttgtgctgaccccgcggggctgcggccggcagccactctgcgtctctcacctgccaggcctgcgtggccttagggttgttcctgttcttttaggttgggcggtgggtctgtgtcctggtgttgagtttctgcaaatttctgggggtgatttctgtgactctgggcccacagcggggangccaagaggggccctgtggactttcacccagcactgtgggggccttcanactctggggcagcananatgctgcttcccatcanccananggggtcagggctgccctgttgccaaaaactccctgaggcctctccncaccccctcancgggcagnaggtcccnccatgtgnacagacttanccaaggagncncccaggtctnttntgctggggnantcagggccncccaccctntcctggnggttttaaatgaatccnccncccctcncccngggnggtttnngncccccctacanntggtgaacccctggccctggntccttnttcctatttcaaantnccnttntgggaaaaaccnccnaatcnntttaggggcccccggnnttttccccccnntnnnn

SEQ ID NO: 466 - DNA, 1205 bp, Homo Sapiens
  misc_feature (1)..(2): n is a, c, g, or t
  misc_feature (914)..(914): n is a, c, g, or t
  misc_feature (960)..(960): n is a, c, g, or t
  misc_feature (971)..(971): n is a, c, g, or t
  misc_feature (979)..(979): n is a, c, g, or t
  misc_feature (987)..(987): n is a, c, g, or t
  misc_feature (996)..(996): n is a, c, g, or t
  misc_feature (1008)..(1008): n is a, c, g, or t
  misc_feature (1021)..(1021): n is a, c, g, or t
  misc_feature (1023)..(1023): n is a, c, g, or t
  misc_feature (1030)..(1030): n is a, c, g, or t
  misc_feature (1040)..(1040): n is a, c, g, or t
  misc_feature (1068)..(1068): n is a, c, g, or t
  misc_feature (1072)..(1072): n is a, c, g, or t
  misc_feature (1080)..(1080): n is a, c, g, or t
  misc_feature (1082)..(1082): n is a, c, g, or t
  misc_feature (1086)..(1086): n is a, c, g, or t
  misc_feature (1097)..(1097): n is a, c, g, or t
  misc_feature (1102)..(1102): n is a, c, g, or t
  misc_feature (1106)..(1107): n is a, c, g, or t
  misc_feature (1118)..(1118): n is a, c, g, or t
  misc_feature (1143)..(1144): n is a, c, g, or t
  misc_feature (1147)..(1147): n is a, c, g, or t
  misc_feature (1149)..(1149): n is a, c, g, or t
  misc_feature (1154)..(1154): n is a, c, g, or t
  misc_feature (1161)..(1161): n is a, c, g, or t
  misc_feature (1166)..(1166): n is a, c, g, or t
  misc_feature (1175)..(1175): n is a, c, g, or t
  misc_feature (1178)..(1178): n is a, c, g, or t
  misc_feature (1182)..(1182): n is a, c, g, or t
  misc_feature (1186)..(1186): n is a, c, g, or t
  misc_feature (1193)..(1193): n is a, c, g, or t
  misc_feature (1196)..(1196): n is a, c, g, or t
  misc_feature (1198)..(1198): n is a, c, g, or t
  misc_feature (1205)..(1205): n is a, c, g, or t
nnattagagaaattactatgagaggatcgcatcaccatcaccatcacggatcctatttaggtgacactatagaatcgtcgacccacgcgtccgcagaaatcataattcagaaggacaaggcgattgtggcccacaacagacatggcaacaaggctgtgtactcagtcatggccatggtggagcacagtggcaactacacgtgcaaagtggagtccagccgcatatccaaggtcagcagcatcgtggtcaacataacagaactattttccaagcccgaactggaatcttccttcacacatctggaccaaggtgaaagactgaacctgtcctgctccatcccaggagcacctccagccaacttcaccatccagaaggaagatacgattgtgtcacagactcaagatttcaccaagatagcctcaaagtcggacagtgggacgtatatctgcactgcaggtattgacaaagtggtcaagaaaagcaacacagtccagatagtcgtatgtgaaatgctctcccagcccaggatttcttatgatgcccagtttgaggtcataaaaggacagaccatcgaagtccgttgcgaatcgatcagtggaactttgcctatttcttaccaacttttaaaaacaagtaaagttttggagaatagtaccaagaactcaaatgatcctgcggtattcaaagacaaccccactgaagacgtcgaataccagtgtgttgcagataattgccattcccacgccaaaatgttaagtgaggttctgagggtgaaggtgatagccccggtggatgaggtccagatttctatcctgtcaagtaaggtggtggagtctggagaggacattgtgctgcaatgtgctgtgaatgaaggatctggtcccatcacctataagttttacagagaaaaaganggcaaacccttctatcaaatgacctcaaatgccacccaggcatttngaaccagccanaaggctancaaggaanaggaggganagtattactgcncagccttcaacananccaaccncgcctccagngtccccaaaaccaaaatactgacagtcnaaantctttctngncccntggaaaaaagnacttnttgnnggggttatccncggagggatcattgcccccttggannatngnggccnaatgttnttttntgaagaaanccnaggnccanccaaatnccntnggaaatn

SEQ ID NO: 467 - DNA, 1096 bp, Homo Sapiens
  misc_feature (1)..(1): n is a, c, g, or t
  misc_feature (789)..(789): n is a, c, g, or t
  misc_feature (794)..(794): n is a, c, g, or t
  misc_feature (813)..(813): n is a, c, g, or t
  misc_feature (860)..(860): n is a, c, g, or t
  misc_feature (872)..(872): n is a, c, g, or t
  misc_feature (881)..(881): n is a, c, g, or t
  misc_feature (932)..(932): n is a, c, g, or t
  misc_feature (952)..(952): n is a, c, g, or t
  misc_feature (970)..(970): n is a, c, g, or t
  misc_feature (984)..(984): n is a, c, g, or t
  misc_feature (993)..(993): n is a, c, g, or t
  misc_feature (1009)..(1009): n is a, c, g, or t
  misc_feature (1016)..(1016): n is a, c, g, or t
  misc_feature (1026)..(1026): n is a, c, g, or t
  misc_feature (1028)..(1029): n is a, c, g, or t
  misc_feature (1033)..(1033): n is a, c, g, or t
  misc_feature (1038)..(1038): n is a, c, g, or t
  misc_feature (1044)..(1044): n is a, c, g, or t
  misc_feature (1050)..(1050): n is a, c, g, or t
  misc_feature (1054)..(1054): n is a, c, g, or t
  misc_feature (1061)..(1061): n is a, c, g, or t
  misc_feature (1071)..(1071): n is a, c, g, or t
  misc_feature (1075)..(1075): n is a, c, g, or t
  misc_feature (1079)..(1080): n is a, c, g, or t
  misc_feature (1085)..(1085): n is a, c, g, or t
  misc_feature (1092)..(1092): n is a, c, g, or t
  misc_feature (1096)..(1096): n is a, c, g, or t
naattagagaaattactatgagaggatcgcatcaccatcaccatcacggatcctatttaggtgacactatagaatcgtcgacccacgcgtccgaggcagtcagcgaggcccaggagaaattgacagaatccaaccagaagctggggctgctgcgggaggctctggagcggagacttggggagctgcccgccgaccaccccaaggggcggctgctgcgagaagagctcgctgcggcctcctccgctgccttcagcacccgcctggccgggccctttcccgccacgcactacagcaccctgtgcaagcccgcgccgctcacagggaccctggaggtacgagtggtgggctgcagagacctcccagagaccatcccgtggaaccctaccccctcaatggggggacctgggaccccagacagccgcccccccttcctgagccgcccagcccggggcctttacagccgaagcggaagcctcagtggccggagcagcctcaaagcagaagccgagaacaccagtcaccttccgcaaccctgtcattgagaggattcctcggctccgacggcagaagaaaattttctccaagcagcaagggaaggcgttccagcgtgctaggcagatgaacatcgatgtcgccacgtgggtgcggctgctccggaggctcatccccaatgccacgggcacaggcacctttagccctggggcttctccaggatccgaggcccggaccacgggtgacatatcggtggagaagctgaacctcggcactgactcggacagctcacctcanaaganctcgcgggatcctccttcnagcccatcgagcctgagctccccatccaggaatccactgctcccganctgccttcgganacccagganacccaggccccgccctgtgcagccctctgagaaagtcacctctgaccctcnaaaattttcaagttcctggnggtgctggggccggggtnattttgggaaaggngctcctttnccaaattccggcccantgggganctgttccccntnnaggnttttnaaaaangggaantttntggcccnaaaaaagtgnaaancttnnttttnaaaaacngaan

SEQ ID NO: 468 - DNA, 1157 bp, Homo Sapiens
  misc_feature (818)..(818): n is a, c, g, or t
  misc_feature (945)..(945): n is a, c, g, or t
  misc_feature (956)..(956): n is a, c, g, or t
  misc_feature (974)..(974): n is a, c, g, or t
  misc_feature (979)..(979): n is a, c, g, or t
  misc_feature (987)..(987): n is a, c, g, or t
  misc_feature (991)..(991): n is a, c, g, or t
  misc_feature (1006)..(1006): n is a, c, g, or t
  misc_feature (1012)..(1012): n is a, c, g, or t
  misc_feature (1018)..(1018): n is a, c, g, or t
  misc_feature (1026)..(1026): n is a, c, g, or t
  misc_feature (1028)..(1028): n is a, c, g, or t
  misc_feature (1034)..(1034): n is a, c, g, or t
  misc_feature (1039)..(1040): n is a, c, g, or t
  misc_feature (1052)..(1052): n is a, c, g, or t
  misc_feature (1054)..(1054): n is a, c, g, or t
  misc_feature (1062)..(1062): n is a, c, g, or t
  misc_feature (1066)..(1067): n is a, c, g, or t
  misc_feature (1070)..(1070): n is a, c, g, or t
  misc_feature (1072)..(1072): n is a, c, g, or t
  misc_feature (1085)..(1085): n is a, c, g, or t
  misc_feature (1096)..(1096): n is a, c, g, or t
  misc_feature (1102)..(1102): n is a, c, g, or t
  misc_feature (1107)..(1107): n is a, c, g, or t
  misc_feature (1113)..(1113): n is a, c, g, or t
  misc_feature (1120)..(1120): n is a, c, g, or t
  misc_feature (1135)..(1135): n is a, c, g, or t
  misc_feature (1143)..(1143): n is a, c, g, or t
  misc_feature (1148)..(1148): n is a, c, g, or t
  misc_feature (1157)..(1157): n is a, c, g, or t
tagagaaattactatgagaggatcgcatcaccatcaccatcacggatcctatttaggtgacactatagaatcgtcgacccacgcgtccgtgagacttggttccatctttgggctaggcttggcttatgctggctcaaatcgtgaagatgtcctaacactgctgctgcctgtgatgggagattcaaagtccagcatggaggtggcaggtgtcacagctttagcctgtggaatgatagcagtagggtcctgcaatggagatgtaacttccactatccttcagaccatcatggagaagtcagagactgagctcaaggatacttatgctcgttggcttcctcttggactgggtctcaaccacctggggaagggtgaggccatcgaggcaatcctggctgcactggaggttgtgtcagagccattccgcagttttgccaacacactggtggatgtgtgtgcatatgcaggctctgggaatgtgctgaaggtgcagcagctgctccacatttgtagcgaacactttgactccaaagagaaggaggaagacaaagacaagaaggaaaagaaagacaaggacaagaaggaagcccctgctgacatgggagcacatcagggagtggctgttctggggattgcccttattgctatgggggaggagattggtgcagagatggcattacgaacctttggccacttgctgagatatggggagcctacactccggagggctgtacctttagcactggccctcatctctgtttcaaatccacgactcaacatcctggataccctaagcaaattctctcatgatgctgatccanaagtttcctataactccatttttgccatgggcatggtgggcagtggtaccaataatgcccgtctggctgcaatgctgccccagttagctcaatatcatgccaaagaacccaacaacctcttcatggngcgcttggcanagggcctgacacatttanggaanggcacccnttanccctctgcccctacnaaagcnaccggnaacttaananccaggnggccnnggctggactgcncnctgggctngtcnnttncnggaggtccaaacnttttctaggcnaacccnctatntattgnatgggcngggggctgcctgcancccccaangctgnttacttttn

SEQ ID NO: 469 - DNA, 1015 bp, Homo Sapiens
  misc_feature (848)..(848): n is a, c, g, or t
  misc_feature (864)..(864): n is a, c, g, or t
  misc_feature (890)..(890): n is a, c, g, or t
  misc_feature (900)..(900): n is a, c, g, or t
  misc_feature (959)..(959): n is a, c, g, or t
  misc_feature (966)..(966): n is a, c, g, or t
  misc_feature (986)..(986): n is a, c, g, or t
  misc_feature (991)..(991): n is a, c, g, or t
  misc_feature (1005)..(1005): n is a, c, g, or t
  misc_feature (1010)..(1010): n is a, c, g, or t
atagagaaattactatgagaggatcgcatcaccatcaccatcacggatcctatttaggtgacactatagaatcgtcgacccacgcgtccgctaggccccccgtcccggtcatggccatgctcagggtccagcccgaggcccaagccaaggtggatgtgtttcgtgaagacctctgtaccaagacagagaacctgctcgggagctatttccccaagaagatttctgagctggatgcatttttaaaggagccagctctcaatgaagccaacttgagcaatctgaaggccccattggacatcccagtgcctgatccagtcaaggagaaagagaaagaggagcggaagaaacagcaggagaaggaagacaaggatgaaaagaagaagggggaggatgaagacaaaggtcctccctgtggcccagtgaactgcaatgaaaagatcgtggtccttctgcagcgcttgaagcctgagatcaaggatgtcattgagcagctcaacctggtcaccacctggttgcagctgcagatacctcggattgaggatggtaacaattttggagtggctgtccaggagaaggtgtttgagctgatgaccagcctccacaccaagctagaaggcttccacactcaaatctctaagtatttctctgagcgtggtgatgcagtgactaaagcagccaagcagccccatgtgggtgattatcggcagctggtgcacgagctggatgaggcagagtaccgggacatccggctgatggtcatggagatccgcaatgcttatgctgtgttatatgacatcatcctgaagaacttcgagaagctcaagaagcccaggggagaaacaaagggnaatgatctattgagangcccctctctcccattctgtgatgantacagcaganaccttcctgctttttactgggggactccaaaatttttccccaaacttgcttctgttganatttttnccttcaccttgccctctcangcacnaataaatataattntaccnctgcc

SEQ ID NO: 470 - DNA, 1293 bp, Homo Sapiens
  misc_feature (916)..(916): n is a, c, g, or t
  misc_feature (952)..(952): n is a, c, g, or t
  misc_feature (955)..(955): n is a, c, g, or t
  misc_feature (968)..(968): n is a, c, g, or t
  misc_feature (971)..(971): n is a, c, g, or t
  misc_feature (997)..(997): n is a, c, g, or t
  misc_feature (1018)..(1018): n is a, c, g, or t
  misc_feature (1030)..(1030): n is a, c, g, or t
  misc_feature (1044)..(1045): n is a, c, g, or t
  misc_feature (1048)..(1048): n is a, c, g, or t
  misc_feature (1055)..(1055): n is a, c, g, or t
  misc_feature (1069)..(1069): n is a, c, g, or t
  misc_feature (1079)..(1079): n is a, c, g, or t
  misc_feature (1087)..(1087): n is a, c, g, or t
  misc_feature (1106)..(1106): n is a, c, g, or t
  misc_feature (1108)..(1108): n is a, c, g, or t
  misc_feature (1117)..(1117): n is a, c, g, or t
  misc_feature (1120)..(1120): n is a, c, g, or t
  misc_feature (1123)..(1123): n is a, c, g, or t
  misc_feature (1161)..(1161): n is a, c, g, or t
  misc_feature (1174)..(1174): n is a, c, g, or t
  misc_feature (1183)..(1183): n is a, c, g, or t
  misc_feature (1192)..(1192): n is a, c, g, or t
  misc_feature (1203)..(1204): n is a, c, g, or t
  misc_feature (1216)..(1216): n is a, c, g, or t
  misc_feature (1218)..(1218): n is a, c, g, or t
  misc_feature (1223)..(1223): n is a, c, g, or t
  misc_feature (1233)..(1233): n is a, c, g, or t
  misc_feature (1235)..(1235): n is a, c, g, or t
  misc_feature (1237)..(1237): n is a, c, g, or t
  misc_feature (1243)..(1244): n is a, c, g, or t
  misc_feature (1247)..(1247): n is a, c, g, or t
  misc_feature (1270)..(1270): n is a, c, g, or t
  misc_feature (1273)..(1273): n is a, c, g, or t
  misc_feature (1280)..(1280): n is a, c, g, or t
  misc_feature (1293)..(1293): n is a, c, g, or t
tagagaaattactatgagaggatcgcatcaccatcaccatcacggatcctatttaggtgacactatagaatcgtcgacccacgcgtccgcagagaagacagtcgatgtctatggccacgtgacgctcatgaggtcccagcgcaactacatggtgcagacggaggaccagtacagcttcatccacgaggccctgctggaggccgtgggctgtggcaacacagaagtgcccgcacgcagcctctatgcctacatccagaagctggcccaggtggagcctggcgaacacgtcactggcatggaactcgagttcaagcggctggctaactccaaggcccacacgtcacgcttcatcagtgccaatctgccttgtaacaagttcaagaaccgcctggtgaacatcatgccctatgagagcacacgggtctgtctgcaacccatccggggtgtggagggctctgactacatcaacgccagcttcattgatggctacaggcagcagaaggcctacatcgcgacacaggggccgctggcggagaccacggaagacttctggcgcatgctgtgggagaacaattcgacgatcgtggtgatgctgaccaagctgcgggagatgggccgggagaagtgtcaccagtactggccggccgagcgctctgcccgctaccagtactttgtggtagatccgatggcagaatacaacatgcctcagtatatcctgcgagagttcaaggtcacagatgcccgggatggccagtcccggactgtccggcagttccagttcacagactggccggaacagggtgtgccaaagtcgggggagggcttcatcgacttcattggccaagtgcataagactaaggagcagtttggccaggacggccccatctctgtccactgcagtgccggcgtgggcagnacgggcgtcttcatcacgcttaacatcgtgctggancgnatgcggtatgaangcntggtggacatctttcaaacggtgaanatgctacaaaccagcggccgncatggtgcaaanaaagaatgaatacnnttntgttacnaggcggccctggantacctcgaanctttgacnctatgcacctaaagcatgntnccccagccnaanccntggcccgaagctttgccctccggggaactctgagctgnacccatggcaggnaagagggcncgcacactntttttccattnnaaaaaaaccctnanccccnggccgggccnanantctggnnggncccttaaattggaattccttttnatnaaaaatnggggggggggggn

SEQ ID NO: 471 - DNA, 565 bp, Homo Sapiens
  misc_feature (559)..(559): n is a, c, g, or t
  misc_feature (562)..(562): n is a, c, g, or t
  misc_feature (565)..(565): n is a, c, g, or t
caattagagaaattactatgagaggatcgcatcaccatcaccatcacggatcctatttaggtgacactatagaatcgtcgacccacgcgtccgggacccgccaacatgggccgcgttcgcaccaaaaccgtgaagaaggcggcccgggtcatcatagaaaagtactacacgcgcctgggcaacgacttccacacgaacaagcgcgtgtgcgaggagatcgccattatccccagcaaaaagctccgcaacaagatagcaggttatgtcacgcatctgatgaagcgaattcagagaggcccagtaagaggtatctccatcaagctgcaggaggaggagagagaaaggagagacaattatgttcctgaggtctcagccttggatcaggagattattgaagtagatcctgacactaaggaaatgctgaagcttttggacttcggcagtctgtccaaccttcaggtcactcagcctacagttgggatgaatttcaaaacgcctcggggacctgtttgaattttttctgtagtgctgtattattttcaataaatctgggacaacngcnaan

SEQ ID NO: 472 - DNA, 1177 bp, Homo Sapiens
  misc_feature (849)..(849): n is a, c, g, or t
  misc_feature (854)..(854): n is a, c, g, or t
  misc_feature (860)..(860): n is a, c, g, or t
  misc_feature (905)..(905): n is a, c, g, or t
  misc_feature (920)..(920): n is a, c, g, or t
  misc_feature (935)..(935): n is a, c, g, or t
  misc_feature (969)..(969): n is a, c, g, or t
  misc_feature (977)..(977): n is a, c, g, or t
  misc_feature (985)..(985): n is a, c, g, or t
  misc_feature (999)..(999): n is a, c, g, or t
  misc_feature (1034)..(1034): n is a, c, g, or t
  misc_feature (1052)..(1052): n is a, c, g, or t
  misc_feature (1063)..(1063): n is a, c, g, or t
  misc_feature (1068)..(1068): n is a, c, g, or t
  misc_feature (1070)..(1070): n is a, c, g, or t
  misc_feature (1073)..(1073): n is a, c, g, or t
  misc_feature (1093)..(1093): n is a, c, g, or t
  misc_feature (1102)..(1102): n is a, c, g, or t
  misc_feature (1118)..(1118): n is a, c, g, or t
  misc_feature (1128)..(1128): n is a, c, g, or t
  misc_feature (1132)..(1132): n is a, c, g, or t
  misc_feature (1136)..(1136): n is a, c, g, or t
  misc_feature (1138)..(1138): n is a, c, g, or t
  misc_feature (1149)..(1149): n is a, c, g, or t
  misc_feature (1154)..(1154): n is a, c, g, or t
  misc_feature (1162)..(1162): n is a, c, g, or t
  misc_feature (1165)..(1165): n is a, c, g, or t
  misc_feature (1168)..(1168): n is a, c, g, or t
  misc_feature (1173)..(1173): n is a, c, g, or t
aattagagaaattactatgagaggatcgcatcaccatcaccatcacggatcctatttaggtgacactatagaatcgtcgacccacgcgtccgatgaatttgatgcagtggtggtaggcgctggaggggcaggcttgcgagctgcatttggcctttctgaggcagggtttaatacagcatgtgttaccaagctgtttcctaccaggtcacacactgttgcagcgcagggaggaatcaatgctgctctggggaacatggaggaggacaactggaggtggcatttctacgacaccgtgaagggctccgactggctgggggaccaggatgccatccactacatgacggagcaggcccccgccgccgtggtcgagctagaaaattatggcatgccgtttagcagaactgaagatgggaagatttatcagcgtgcatttggtggacagagcctcaagtttggaaagggcgggcaggcccatcggtgctgctgtgtggctgatcggactggccactcgctattgcacaccttatatggacggtctctgcgatatgataccagctattttgtggagtattttgccttggatctcctgatggagaacggggagtgccgtggtgtcatcgcactgtgcatagaggacgggtccatccatcgcataagagcaaagaacactgttgttgccacaggaggctacgggcgcacctacttcagctgcacgtctgcccacaccagcactggcgacggcacggccatgatcaccagggcaggccttccttgccaggacctagagtttgttcagttccaccccacaggcatatatggtgctggttgtctcattacggaaggatgtcntgganagggangcattctcattaacagtcaaggcgaaaggtttatggagcgatacncccctgtcgcgaagnacctggcgtctaaanatgtggtgtctcggtcgatgactctggaaatccnaaaagaangtcctgangcacgtgaatggcnagaatcaaatgtgcccggcctgtacccctgtgggnagccccctgtgccccggnaatggggccanccccncnggncaactcccccttggacctgntttctttgncgggcattgcccgaanatcaaaaacntgcnggcngnaaaaaaatccncccanaaaccaanccnggnaaaancctc

SEQ ID NO: 473 - DNA, 1236 bp, Homo Sapiens
  misc_feature (1)..(1): n is a, c, g, or t
  misc_feature (801)..(801): n is a, c, g, or t
  misc_feature (822)..(822): n is a, c, g, or t
  misc_feature (828)..(828): n is a, c, g, or t
  misc_feature (831)..(831): n is a, c, g, or t
  misc_feature (882)..(882): n is a, c, g, or t
  misc_feature (913)..(913): n is a, c, g, or t
  misc_feature (924)..(924): n is a, c, g, or t
  misc_feature (933)..(933): n is a, c, g, or t
  misc_feature (940)..(940): n is a, c, g, or t
  misc_feature (950)..(950): n is a, c, g, or t
  misc_feature (973)..(973): n is a, c, g, or t
  misc_feature (978)..(978): n is a, c, g, or t
  misc_feature (1000)..(1000): n is a, c, g, or t
  misc_feature (1004)..(1004): n is a, c, g, or t
  misc_feature (1006)..(1006): n is a, c, g, or t
  misc_feature (1047)..(1048): n is a, c, g, or t
  misc_feature (1051)..(1051): n is a, c, g, or t
  misc_feature (1054)..(1054): n is a, c, g, or t
  misc_feature (1066)..(1066): n is a, c, g, or t
  misc_feature (1069)..(1070): n is a, c, g, or t
  misc_feature (1083)..(1083): n is a, c, g, or t
  misc_feature (1087)..(1088): n is a, c, g, or t
  misc_feature (1092)..(1092): n is a, c, g, or t
  misc_feature (1099)..(1099): n is a, c, g, or t
  misc_feature (1119)..(1120): n is a, c, g, or t
  misc_feature (1131)..(1131): n is a, c, g, or t
  misc_feature (1133)..(1134): n is a, c, g, or t
  misc_feature (1148)..(1148): n is a, c, g, or t
  misc_feature (1158)..(1158): n is a, c, g, or t
  misc_feature (1165)..(1165): n is a, c, g, or t
  misc_feature (1175)..(1175): n is a, c, g, or t
  misc_feature (1181)..(1181): n is a, c, g, or t
  misc_feature (1183)..(1183): n is a, c, g, or t
  misc_feature (1189)..(1189): n is a, c, g, or t
  misc_feature (1191)..(1191): n is a, c, g, or t
  misc_feature (1196)..(1196): n is a, c, g, or t
  misc_feature (1198)..(1199): n is a, c, g, or t
  misc_feature (1202)..(1203): n is a, c, g, or t
  misc_feature (1220)..(1220): n is a, c, g, or t
naatagagaaattactatgagaggatcgcatcaccatcaccatcacggatcctatttaggtgacactatagaatcgtcgacccacgcgtccgggggccgcgggagacgtggtgccgctgcgggctcgctctgccgtgcgctaggcttggtgggaaggcctgttctcgagtccgcgcttttcgtcaccgccatgtcgggaggtggtgtgattcgtggccccgcagggaacaacgattgccgcatctacgtgggtaacttacctccagacatccgaaccaaggacattgaggacgtgttctacaaatacggcgctatccgcgacatcgacctcaagaatcgccgcgggggaccgcccttcgccttcgttgagttcgaggacccgcgagacgcggaagacgcggtgtatggtcgcgacggctatgattacgatgggtaccgtctgcgggtggagtttcctcgaagcggccgtggaacaggccgaggcggcggcgggggtggaggtggcggagctccccgaggtcgctatggccccccatccaggcggtctgaaaacagagtggttgtctctggactgcctccaagtggaagttggcaggatttaaaggatcacatgcgtgaagcaggtgatgtatgttatgctgatgtttaccgagatggcactggtgtcgtggagtttgtacggaaagaagatatgacctatgcagttcgaaaactggataacactaagtttagatctcatgagggagaaactgcctacatccgggttaaagttgatgggcccagaagtccaagttatggaanatctcgatctcgaagccgtantcgtancanaagccgtagcagaagcaacagcaggagtcgcagttactccccaaggagaancagaggatcaccacgctattctccccgtcanaacaaatctcnctctcgtanataaaangattggtganctttttttaaaaccatgttgtanacaanttttcctttattcaaaaaatcntttncnttttttaattcaaactgttttttttcaaaatggcctaaagnnttnaanttgcattcttgnaannatccccttgcccnaaanncaanattcccnttcgggctttgaaaaaattnnattttaagggnannccaaaaacggaatntttaaaattnattaacncccaaccctncaaaangnaaaatngnaaatntnnatnnccccgtttttggtaacntgaaatttgggggttt

SEQ ID NO: 474 - DNA, 734 bp, Homo Sapiens
  misc_feature (1)..(1): n is a, c, g, or t
  misc_feature (705)..(708): n is a, c, g, or t
  misc_feature (715)..(715): n is a, c, g, or t
  misc_feature (719)..(719): n is a, c, g, or t
  misc_feature (721)..(725): n is a, c, g, or t
  misc_feature (727)..(727): n is a, c, g, or t
  misc_feature (729)..(729): n is a, c, g, or t
  misc_feature (731)..(734): n is a, c, g, or t
naatagagaaattactatgagaggatcgcatcaccatcaccatcacggatcctatttaggtgacactatagaatcgtcgacccacgcgtccgccactgcgcagaccagacttcgctcgtactcgtgcgcctcgctttgcttttcctccgcaaccatgtctgacaaacccgatatggctgagatcgagaaattcgataagtcgaaactgaagaagacagagacgcaagagaaaaatccactgccttccaaagaaacgattgaacaggagaagcaagcaggcgaatcgtaatgaggcgtgcgccgccaatatgcactgtacattccacaagcattgccttcttattttacttcttttagctgtttaactttgtaagatgcaaagaggttggatcaagtttaaatgactgtgctgcccctttcacatcaaagaactactgacaacgaaggccgcgcctgcctttcccatctgtctatctatctggctggcagggaaggaaagaacttgcatgttggtgaaggaagaagtggggtggaagaagtggggtgggacgacagtgaaatctagagtaaaaccaagctggcccaaggtgtcctgcaggctgtaatgcagtttaatcagagtgccatttttttttttgttcaaatgattttaattattggaatgcacaatttttttaatatgcaaataaaaagtttaaaaagttnnnnaaaaaanaaanannnnnananannnn

SEQ ID NO: 475 - DNA, 1179 bp, Homo Sapiens
  misc_feature (1)..(2): n is a, c, g, or t
  misc_feature (826)..(826): n is a, c, g, or t
  misc_feature (885)..(885): n is a, c, g, or t
  misc_feature (892)..(892): n is a, c, g, or t
  misc_feature (895)..(895): n is a, c, g, or t
  misc_feature (898)..(898): n is a, c, g, or t
  misc_feature (910)..(910): n is a, c, g, or t
  misc_feature (918)..(918): n is a, c, g, or t
  misc_feature (948)..(948): n is a, c, g, or t
  misc_feature (968)..(968): n is a, c, g, or t
  misc_feature (989)..(989): n is a, c, g, or t
  misc_feature (996)..(996): n is a, c, g, or t
  misc_feature (1007)..(1007): n is a, c, g, or t
  misc_feature (1013)..(1013): n is a, c, g, or t
  misc_feature (1027)..(1027): n is a, c, g, or t
  misc_feature (1034)..(1034): n is a, c, g, or t
  misc_feature (1041)..(1041): n is a, c, g, or t
  misc_feature (1055)..(1055): n is a, c, g, or t
  misc_feature (1057)..(1057): n is a, c, g, or t
  misc_feature (1059)..(1059): n is a, c, g, or t
  misc_feature (1087)..(1087): n is a, c, g, or t
  misc_feature (1097)..(1097): n is a, c, g, or t
  misc_feature (1107)..(1109): n is a, c, g, or t
  misc_feature (1114)..(1114): n is a, c, g, or t
  misc_feature (1118)..(1118): n is a, c, g, or t
  misc_feature (1120)..(1120): n is a, c, g, or t
  misc_feature (1124)..(1125): n is a, c, g, or t
  misc_feature (1136)..(1136): n is a, c, g, or t
  misc_feature (1139)..(1139): n is a, c, g, or t
  misc_feature (1146)..(1146): n is a, c, g, or t
  misc_feature (1148)..(1148): n is a, c, g, or t
  misc_feature (1175)..(1175): n is a, c, g, or t
  misc_feature (1178)..(1178): n is a, c, g, or t
nnatagagaaattactatgagaggatcgcatcaccatcaccatcacggatcctatttaggtgacactatagaatcgtcgacccacgcgtccgcctggagtctctgtggcgcggtttcctgtacctgccttgggatccggagggaggaagctgggacacccgggagtcaggaaatggactcggtggcttttgaggatgtagatgtgaacttcacccaggaggagtgggctttgctagatccttcccagaagaatctctacagagatgtgatgtgggaaaccatgaggaatctggcctctatagggaaaaaatggaaggaccagaacattaaagatcactacaaacaccgagggagaaatctaagaagtcatatgttagaaagactctatcaaactaaggatggtagtcagcgtggaggaatttttagccagtttgcaaatcagaatctgagcaagaaaatccctggagtgaaactctgtgaaagcattgtatatggagaagtcagcatgggtcagtcatcccttaatagacacatcaaagatcacagtggacatgaaccaaaggaatatcaggaatatggagagaagccagatacacgtaaccagtgttggaaacccttcagttctcaccactcctttcgaacacatgagataattcacactggagagaaactctatgattgtaaggaatgtggaaaaaccttcttttctctcaaaagaattagaagacacatcatcacacacagtggatatacaccatataaatgtaaggtgtgtgggaaagcttttgattatcccagtagatttccaaacacatgaaagaagtcncactggagagaaaccctatgaatgtcaggaatgtggaaaagccttcccttgtatcacangtgttcnaanacncatgataaagcncactgganatggaccttataaatgtaaggtatgtgggnaaaccctttcattccctganttcatttcaagtgcatgaaanaatcccnctggaaaaaancccttnaaatgtaaccatgnggtaaanccttcanttgttcccccaccntncnaaaacctgaaaaaacccctactggaaanaaaccttttnaatgccaccnnnggggnaagncnttcnntttttcccccnccntccacancngaaaaaaattcccccggggaaaaaccntcnc

SEQ ID NO: 476 - DNA, 1185 bp, Homo Sapiens
  misc_feature (32)..(32): n is a, c, g, or t
  misc_feature (61)..(61): n is a, c, g, or t
  misc_feature (836)..(836): n is a, c, g, or t
  misc_feature (892)..(892): n is a, c, g, or t
  misc_feature (925)..(925): n is a, c, g, or t
  misc_feature (970)..(970): n is a, c, g, or t
  misc_feature (994)..(994): n is a, c, g, or t
  misc_feature (997)..(997): n is a, c, g, or t
  misc_feature (999)..(999): n is a, c, g, or t
  misc_feature (1048)..(1048): n is a, c, g, or t
  misc_feature (1073)..(1074): n is a, c, g, or t
  misc_feature (1087)..(1087): n is a, c, g, or t
  misc_feature (1092)..(1092): n is a, c, g, or t
  misc_feature (1110)..(1110): n is a, c, g, or t
  misc_feature (1119)..(1120): n is a, c, g, or t
  misc_feature (1125)..(1125): n is a, c, g, or t
  misc_feature (1128)..(1128): n is a, c, g, or t
  misc_feature (1134)..(1135): n is a, c, g, or t
  misc_feature (1138)..(1138): n is a, c, g, or t
  misc_feature (1146)..(1146): n is a, c, g, or t
  misc_feature (1148)..(1148): n is a, c, g, or t
  misc_feature (1150)..(1150): n is a, c, g, or t
  misc_feature (1152)..(1153): n is a, c, g, or t
  misc_feature (1156)..(1156): n is a, c, g, or t
  misc_feature (1160)..(1160): n is a, c, g, or t
  misc_feature (1162)..(1162): n is a, c, g, or t
agagagattactatgagaggatcgcatcaccntcaccatcacggatcctatttaggtgacnctataggaatcgtcgacccacgcgtccgagccgatcctactgcagggccatgagcggtccattacgcagattaagtataaccgcgaaggagacctcctctttactgtggccaaggaccctatcgtcaatgtatggtactctgtgaatggtgagaggctgggcacctacatgggccataccggagctgtgtggtgtgtggacgctgactgggacaccaagcatgtcctcactggctcagctgacaacagctgtcgtctctgggactgtgaaacaggaaagcagctggcccttctcaagaccaattcggctgtccggacctgcggttttgactttgggggcaacatcatcatgttctccacggacaagcagatgggctaccagtgcttttctggagaggtgttggtgaatgttaaggagcactcccggcagatcaacgacatccagttatccagggacatgaccatgtttgtgaccgcgtccaaggacaacacagccaagctttttgactccacaactcttgaacatcagaagactttccggacagaacgtcctgtcaactcagctgccctctcccccaactatgaccatgtggtcctgggcggtggtcaggaagccatggatgtaaccacaacctccaccaggattggcaagtttgaggccaggttcttccatttggcctttgaagaagagtttggaagagtcaagggtcactttggacctatcaacagtgttgccttccatcctgatggcaagagctacagcagcggcggcgaanatggttacgtccgtatccattacttcgacccacagtacttcgaatttgagtttgangcttaaaaagctggatctcctgccgggcgtggnggctcatgcctgtaatccccccacttttttttttaaggcaggcgnatcacctgaggtcaggagtttaanacnancctgaccaaaatggaaaaacctcctccctactaaaaatacaaaaattanccaggcatgggggcccccccctaanntcccacctactcnggagnttgaggcaggaaaatccnttgaacccnnaggcnaangttgcnnganctaaatcncncntnnccncccncngaacccaaaaaaaaaatcccttc

SEQ ID NO: 477 - DNA, 1179 bp, Homo Sapiens
  misc_feature (1)..(1): n is a, c, g, or t
  misc_feature (15)..(15): n is a, c, g, or t
  misc_feature (927)..(927): n is a, c, g, or t
  misc_feature (943)..(943): n is a, c, g, or t
  misc_feature (946)..(946): n is a, c, g, or t
  misc_feature (961)..(961): n is a, c, g, or t
  misc_feature (974)..(974): n is a, c, g, or t
  misc_feature (990)..(990): n is a, c, g, or t
  misc_feature (998)..(998): n is a, c, g, or t
  misc_feature (1000)..(1000): n is a, c, g, or t
  misc_feature (1004)..(1004): n is a, c, g, or t
  misc_feature (1006)..(1006): n is a, c, g, or t
  misc_feature (1025)..(1025): n is a, c, g, or t
  misc_feature (1035)..(1035): n is a, c, g, or t
  misc_feature (1045)..(1045): n is a, c, g, or t
  misc_feature (1053)..(1053): n is a, c, g, or t
  misc_feature (1073)..(1073): n is a, c, g, or t
  misc_feature (1077)..(1077): n is a, c, g, or t
  misc_feature (1093)..(1093): n is a, c, g, or t
  misc_feature (1099)..(1099): n is a, c, g, or t
  misc_feature (1104)..(1104): n is a, c, g, or t
  misc_feature (1121)..(1121): n is a, c, g, or t
  misc_feature (1125)..(1125): n is a, c, g, or t
  misc_feature (1130)..(1130): n is a, c, g, or t
  misc_feature (1138)..(1138): n is a, c, g, or t
  misc_feature (1144)..(1144): n is a, c, g, or t
  misc_feature (1158)..(1158): n is a, c, g, or t
  misc_feature (1171)..(1171): n is a, c, g, or t
naatagagaaattanctatgagaggatcgcatcaccatcaccatcacggatcctatttaggtgacactatagaatcgtcgacccacgcgtccgccagaaacctagataagaaggacttcctgggaaaatcagatccatttctggagttcttccgccagggtgatgggaaatggcacctggtgtacagatctgaggtcatcaagaacaacctgaaccctacatggaagcgtttctcagtccccgttcagcatttctgtggtgggaaccccagcacacccatccaggtgcgatgctccgattatgacagtgacgggtcacatgatctcatcggtaccttccacaccagcttggcccagctgcaggcagtcccggctgagtttgaatgcatccaccctgagaagcagcagaaaaagaaaagctacaagaactctggaactatccgtgtcaagatttgtcgggtagaaacagagtactcctttctggactatgtgatgggaggctgtcagatcaacttcactgtgggcgtggacttcactggctccaatggagacccctcctcacctgactccctacactacctgagtccaacaggggtcaatgagtacctgatggcactgtggagtgtgggcagcgtggttcaggactatgactcagacaagctgttccctgcatttggatttggggcccaggttccccctgactggcaggtctcgcatgaatttgccttgaatttcaaccccagtaacccctactgtgcaggcatccagggcattgtggatgcctaccgccaagccctgccccaagttcgcctctatggccctaccaacttttgcacccatcatcaaccatgtggccaggtttgcagcccaggctgcacatcaggggactgcctcgcaatacttcatgctgttgctgctgactgatggngctgtgacggatgtgnaancccacgtgaggctgnggtgcgtgcctcnaacctgcccatgtcantgatcatngngggngngggggggctgactttgagncctggaacanctggaccctnatgggganccctgcaaaacgttctgggnaggntgctgcccccaaattngggcantttgnaccctacccccggttcnaaangcccnccggaagnattggncaaaccgggttccnaaaatggcccccnaatggtct

SEQ ID NO: 478 - DNA, 1106 bp, Homo Sapiens
  misc_feature (808)..(808): n is a, c, g, or t
  misc_feature (836)..(836): n is a, c, g, or t
  misc_feature (881)..(881): n is a, c, g, or t
  misc_feature (894)..(894): n is a, c, g, or t
  misc_feature (929)..(929): n is a, c, g, or t
  misc_feature (954)..(954): n is a, c, g, or t
  misc_feature (959)..(959): n is a, c, g, or t
  misc_feature (967)..(967): n is a, c, g, or t
  misc_feature (978)..(978): n is a, c, g, or t
  misc_feature (986)..(986): n is a, c, g, or t
  misc_feature (989)..(989): n is a, c, g, or t
  misc_feature (994)..(994): n is a, c, g, or t
  misc_feature (1003)..(1003): n is a, c, g, or t
  misc_feature (1010)..(1010): n is a, c, g, or t
  misc_feature (1015)..(1015): n is a, c, g, or t
  misc_feature (1024)..(1024): n is a, c, g, or t
  misc_feature (1026)..(1026): n is a, c, g, or t
  misc_feature (1029)..(1029): n is a, c, g, or t
  misc_feature (1035)..(1035): n is a, c, g, or t
  misc_feature (1037)..(1037): n is a, c, g, or t
  misc_feature (1040)..(1040): n is a, c, g, or t
  misc_feature (1042)..(1042): n is a, c, g, or t
  misc_feature (1044)..(1044): n is a, c, g, or t
  misc_feature (1058)..(1058): n is a, c, g, or t
  misc_feature (1060)..(1060): n is a, c, g, or t
  misc_feature (1069)..(1069): n is a, c, g, or t
  misc_feature (1087)..(1087): n is a, c, g, or t
  misc_feature (1092)..(1092): n is a, c, g, or t
  misc_feature (1096)..(1096): n is a, c, g, or t
  misc_feature (1099)..(1099): n is a, c, g, or t
  misc_feature (1104)..(1104): n is a, c, g, or t
tagagaaattactatgagaggatcgcatcaccatcaccatcacggatcctatttaggtgacactatagaatcgtcgacccacgcgtccggtcccagcagcagatgcaaagcgacctggacaaggctgacctcagtgccaggagggtccctggtgggtgctgcacgaggcaggcatcactgcagaagagtgacagagctgggcctggcagtgaagcgtcttcagaagcagaatctggagaaggatcaggtcgacaaggacctcaccgagaagcttgaggccctggaatccctgcggctacaggagcaggcggccctggagacagaggacggagaggggctacagcagagcctaagggacctggcacaggccgtcctgtctgacgctgagagcggcagcctgcgtccaacagcgtccgaccgcagcctgcgggggctctcgggccagcggaccccgtctccaccgcggcgctcctcgccgggccgaggccgttcgccccgcagaggcccctccccggcctgctcagacgactccacgctcgcttgccctgattctctccaccctgcacttttgccagctgaaggtccagggagaagagcaacctggtccacagcctgcaggtggcccagcagcaggccgaggagctgccgcaggagcgggagaagctgcaggttgcccaggaggagctgcagcgccagcgggaccggctggaggaagagcaggaagaggcggtgcagaatggcgcacgggttctccgggagcttgagcgcagccatagacaactagagcagctggaagggaagcgctcantcctggccaaggagctggtggaggtganggaggcgctgaaccgcgccacgctgcaacgggacatgctgcaagnccaaaaaaccgangtggccgaagcgctgaccaaggctgaagctggccncatggaactcgagctctccgtgacnaattnaagggcanaagaaggcctnccttgcanganttccntgttccaanctgaacnccctnaatgaaaancnttnctcagnanaantngnattttaaactgccntnttcccccancttggaagaaaaaaaagnccccncttncanggccngg

SEQ ID NO: 479 - DNA, 1121 bp, Homo Sapiens
  misc_feature (863)..(863): n is a, c, g, or t
  misc_feature (888)..(888): n is a, c, g, or t
  misc_feature (894)..(894): n is a, c, g, or t
  misc_feature (910)..(910): n is a, c, g, or t
  misc_feature (922)..(922): n is a, c, g, or t
  misc_feature (954)..(954): n is a, c, g, or t
  misc_feature (991)..(991): n is a, c, g, or t
  misc_feature (998)..(998): n is a, c, g, or t
  misc_feature (1000)..(1000): n is a, c, g, or t
  misc_feature (1002)..(1002): n is a, c, g, or t
  misc_feature (1006)..(1007): n is a, c, g, or t
  misc_feature (1027)..(1027): n is a, c, g, or t
  misc_feature (1046)..(1046): n is a, c, g, or t
  misc_feature (1048)..(1049): n is a, c, g, or t
  misc_feature (1052)..(1052): n is a, c, g, or t
  misc_feature (1061)..(1064): n is a, c, g, or t
  misc_feature (1068)..(1068): n is a, c, g, or t
  misc_feature (1072)..(1072): n is a, c, g, or t
  misc_feature (1079)..(1079): n is a, c, g, or t
  misc_feature (1081)..(1081): n is a, c, g, or t
  misc_feature (1097)..(1097): n is a, c, g, or t
  misc_feature (1100)..(1101): n is a, c, g, or t
  misc_feature (1105)..(1105): n is a, c, g, or t
aatagagagattactatgagaggatcgcatcaccatcaccatcacggatcctatttaggtgacactatagaatcgtcgacccacgcgtccggcagcagcgacccctactgcatcgtgaaggtggacaatgagcccatcatcaggacagccacagtgtggaagaccctgtgccccttctggggtgaggagtaccaagtgcacctgccgcccaccttccacgctgtggctttctatgtcatggatgaggatgccctcagccgggacgacgttatcggaaaggtctgccttacaagggacaccatagcctctcaccctaagggtaagttctcccttccctcccacactggtctgcccagtccctggcctccctcccactcggagacctcccctctaggctccgtctggtctcctgctcagggaaagccatttctactctccccagaagccggggccacgttctgtactcctggcctctgttctgcagcatgttcccaagcctggttgttactgcctcttccctagggtgaagaggggctgctatgggtggaatctgaggcctctgctggcagaagaaggggcctccttacactctattgctgaagcatagggaccccttctccaaatcaggccagctccttctgtaacccatggggtcgcctccatctgggccctagtactactgtgtcctaagtctgaagggttggcctagagccagtccaggctggagatccctttcaattatttctgggatgcagacattgttttgtgttattgtttttacaatttttatatagtttttttttaaaaaaaaggccgggcacggtggctcacacctgtaatcccagcactttgggaaggccganacgggtggatcacgaaggtcagganatcganaaccatcctggctaanacgggtgaaaancccgtctctactaaaagtacaaaaaaaattanctgggcgtggtggcaggcacctgtaatcctaactaanttggcangntnaaannaggaaaaatggcgtgaaacntgggaaggcaaaacttggnannaanccaaaaatnnnnccantggncttccancnttaaaaagggaaaaanaanncccncctccaaaaaaaatta

SEQ ID NO: 480 - DNA, 1325 bp, Homo Sapiens
  misc_feature (1)..(1): n is a, c, g, or t
  misc_feature (15)..(15): n is a, c, g, or t
  misc_feature (828)..(828): n is a, c, g, or t
  misc_feature (908)..(908): n is a, c, g, or t
  misc_feature (927)..(927): n is a, c, g, or t
  misc_feature (942)..(942): n is a, c, g, or t
  misc_feature (986)..(986): n is a, c, g, or t
  misc_feature (1013)..(1013): n is a, c, g, or t
  misc_feature (1016)..(1016): n is a, c, g, or t
  misc_feature (1041)..(1041): n is a, c, g, or t
  misc_feature (1052)..(1052): n is a, c, g, or t
  misc_feature (1057)..(1058): n is a, c, g, or t
  misc_feature (1061)..(1061): n is a, c, g, or t
  misc_feature (1065)..(1065): n is a, c, g, or t
  misc_feature (1073)..(1073): n is a, c, g, or t
  misc_feature (1078)..(1078): n is a, c, g, or t
  misc_feature (1088)..(1088): n is a, c, g, or t
  misc_feature (1097)..(1097): n is a, c, g, or t
  misc_feature (1109)..(1110): n is a, c, g, or t
  misc_feature (1126)..(1126): n is a, c, g, or t
  misc_feature (1128)..(1129): n is a, c, g, or t
  misc_feature (1135)..(1135): n is a, c, g, or t
  misc_feature (1140)..(1140): n is a, c, g, or t
  misc_feature (1151)..(1151): n is a, c, g, or t
  misc_feature (1155)..(1156): n is a, c, g, or t
  misc_feature (1164)..(1164): n is a, c, g, or t
  misc_feature (1166)..(1166): n is a, c, g, or t
  misc_feature (1174)..(1174): n is a, c, g, or t
  misc_feature (1185)..(1185): n is a, c, g, or t
  misc_feature (1190)..(1190): n is a, c, g, or t
  misc_feature (1193)..(1193): n is a, c, g, or t
  misc_feature (1200)..(1200): n is a, c, g, or t
  misc_feature (1209)..(1209): n is a, c, g, or t
  misc_feature (1213)..(1214): n is a, c, g, or t
  misc_feature (1220)..(1220): n is a, c, g, or t
  misc_feature (1240)..(1240): n is a, c, g, or t
  misc_feature (1249)..(1249): n is a, c, g, or t
  misc_feature (1255)..(1255): n is a, c, g, or t
  misc_feature (1259)..(1259): n is a, c, g, or t
  misc_feature (1284)..(1284): n is a, c, g, or t
  misc_feature (1286)..(1286): n is a, c, g, or t
  misc_feature (1288)..(1288): n is a, c, g, or t
  misc_feature (1310)..(1310): n is a, c, g, or t
  misc_feature (1312)..(1312): n is a, c, g, or t
  misc_feature (1320)..(1320): n is a, c, g, or t
  misc_feature (1323)..(1323): n is a, c, g, or t
  misc_feature (1325)..(1325): n is a, c, g, or t
naatagagagattanctatgagaggatcgcatcaccatcaccatcacggatcctatttaggtgacactatagaatcgtcgacccacgcgtccgggaatcgggctgattcatcgccggtttgcagactgagccgcgtcgggtgtgcgccgctgctgctgttgcctctgtcttcgcgtcaccacagaggcaagacaagggtccatatcgcggcatccggctcccgcccgtcttcaggagagaaagaaaaaataaaatatacttggggaagttgtacctgccagaattagcaagagctttctttaagaagacatttgtcaaactcaacaaattgaaggttaacaccttaagagttgtagttactgaccagaaatatggacagacttcttagacttggaggaggtatgcctggactgggccaggggccacctacagatgctcctgcagtggacacagcagaacaagtctatatctcttccctggcactgttaaaaatgttaaaacatggccgtgctggagttccaatggaagttatgggtttgatgcttggagaatttgttgatgattataccgtcagagtgattgatgtgtttgctatgccacagtcaggaacaggtgtcagtgtggaggcagttgatccagtgttccaagctaaaatgttggatatgttgaagcagacaggaaggccggagatggttgttggttggtatcacagtcaccctggctttggttgttggctttctggtgtggatatcaacactcagcagagctttgaagccttgtcggagagagctgtggcagtggttgtggatcccattcagagtgtaaaangaaaggttgttattgatgccttcagattgatcaatgctaatatgatggtcttaggacatgaaccaagacaaacaacttcnaatctgggtcacttaaacnagccatctatccagncattaattcatggactaaacagacattattactccattactatnaactatcggaaaaatgaactggaacanaanagttgctaatttgccataaaaaaantggatggaagnttgannctnccgnactacggngaacnttgtaacccnatgaatccntggtaaaaaaannttggaattacccaaantnnaaaaangctgnaaaaaaaaaanaaannaccctaancnctggcaanaaaaaagttgncaacnggnccccacncctttgganaaanngggganacttaaaacccaaatttccnggttaaccnttttgnaccncccttttaaaaccccaaacccttangngnccccgggaattcctgtgtccangncaaaaagnccntn

SEQ ID NO: 481 - DNA, 600 bp, Homo Sapiens
gaatagagaaattactatgagaggatcgcatcaccatcaccatcacggatcctatttaggtgacactatagaatcgtcgacccacgcgtccgggcaggtgtacagctctgcccaggacagcgagggcaggtgtatctgcacagtggtcgccccacagcagaccatgtgttcacgggatgcccgcacaaaacagctgaggcagctactggagaaggtgcagaacatgtctcaatccatagaggtcttggacaggcggacccagagagacttgcagtacgtggagaagatggagaaccaaatgaaaggactggagtccaagttcaaacaggtggaggagagtcataagcaacacctggccaggcagtttaagggctaacttaaaagagttttttcaatgctgcagtgactgaagaagcagtccactcccatgtaaccatgaaagagagccagagagctttttgcaccatgcatttttactattattttccaatacttagcaccatttcactaaggaaccttgaatacaacgaggatcctcctttgcatgcgactgtagctgcatttcatgaatagtttgaacccttgtcaatgcattttttg

SEQ ID NO: 482 - DNA, 1284 bp, Homo Sapiens
  misc_feature (936)..(936): n is a, c, g, or t
  misc_feature (938)..(938): n is a, c, g, or t
  misc_feature (952)..(952): n is a, c, g, or t
  misc_feature (989)..(989): n is a, c, g, or t
  misc_feature (1005)..(1005): n is a, c, g, or t
  misc_feature (1030)..(1030): n is a, c, g, or t
  misc_feature (1046)..(1046): n is a, c, g, or t
  misc_feature (1048)..(1048): n is a, c, g, or t
  misc_feature (1053)..(1053): n is a, c, g, or t
  misc_feature (1055)..(1055): n is a, c, g, or t
  misc_feature (1070)..(1070): n is a, c, g, or t
  misc_feature (1083)..(1083): n is a, c, g, or t
  misc_feature (1091)..(1091): n is a, c, g, or t
  misc_feature (1128)..(1129): n is a, c, g, or t
  misc_feature (1151)..(1151): n is a, c, g, or t
  misc_feature (1157)..(1159): n is a, c, g, or t
  misc_feature (1165)..(1165): n is a, c, g, or t
  misc_feature (1169)..(1170): n is a, c, g, or t
  misc_feature (1172)..(1172): n is a, c, g, or t
  misc_feature (1180)..(1181): n is a, c, g, or t
  misc_feature (1200)..(1200): n is a, c, g, or t
  misc_feature (1211)..(1212): n is a, c, g, or t
  misc_feature (1217)..(1217): n is a, c, g, or t
  misc_feature (1225)..(1225): n is a, c, g, or t
  misc_feature (1227)..(1227): n is a, c, g, or t
  misc_feature (1241)..(1241): n is a, c, g, or t
  misc_feature (1257)..(1257): n is a, c, g, or t
  misc_feature (1269)..(1269): n is a, c, g, or t
  misc_feature (1279)..(1280): n is a, c, g, or t
tagagaaattactatgagaggatcgcatcaccatcaccatcacggatcctatttaggtgacactatagaatcgtcgacccacgcgtccggcagcatggcggcgggggcggctgaggcagctgtagcggccgtggaggaggtcggctcagccgggcagtttgaggagctgctgcgcctcaaagccaagtccctccttgtggtccatttctgggcaccatgggctccacagtgtgcacagatgaacgaagttatggcagagttagctaaagaactccctcaagtttcatttgtgaagttggaagctgaaggtgttcctgaagtatctgaaaaatatgaaattagctctgttcccacttttctgtttttcaagaattctcagaaaatcgaccgattagatggtgcacatgccccagagttgaccaaaaaagttcagcgacatgcatctagtggctccttcctacccagcgctaatgaacatcttaaagaagatctcaaccttcgcttgaagaaattgactcatgctgccccctgcatgctgtttatgaaaggaactcctcaagaaccacgctgtggtttcagcaagcagatggtggaaattcttcacaaacataatattcagtttagcagttttgatatcttctcagatgaagaggttcgacagggactcaaagcctattccagttggcctacctatcctcagctctatgtttctggagagctcataggaggacttgatataattaaggagctagaagcatctgaagaactagatacaatttgtcccaaagctcccaaattagaggaaaggctcaaagtgctgacaaataaaagcttctgtgatgctctttatgaaaggaaacaaacaggaagcaaaatgtggattcagcaaacaaattctggaaatactaatagtactggggttgaatatgaaacatncnatatattggaggangaaaaaattcggcaaggattaaagcttactcaaaatnggccaacatacccccnacctgtatgtgaaaggggaactggnggaggattggaaattngngaagnanctgaaaaaaaatggngaattgctgcctntactgganagaaaaaaataaaaaatcttaaacttggggcccactnntggaaaaaaattttattacttngggacnnnttctgnattnntnccccaaannggactaagaaaaaaaaatncccgccttccnnaaaangtttgggnanttccaaggccggcnaaaaaaaggaggtaanttttttcccccnaaaaaaaggnnaaaa

SEQ ID NO: 483 - DNA, 1106 bp, Homo Sapiens
  misc_feature (940)..(940): n is a, c, g, or t
  misc_feature (974)..(974): n is a, c, g, or t
  misc_feature (983)..(983): n is a, c, g, or t
  misc_feature (992)..(992): n is a, c, g, or t
  misc_feature (1000)..(1000): n is a, c, g, or t
  misc_feature (1015)..(1015): n is a, c, g, or t
  misc_feature (1021)..(1021): n is a, c, g, or t
  misc_feature (1033)..(1033): n is a, c, g, or t
  misc_feature (1041)..(1041): n is a, c, g, or t
  misc_feature (1045)..(1045): n is a, c, g, or t
  misc_feature (1049)..(1049): n is a, c, g, or t
  misc_feature (1051)..(1051): n is a, c, g, or t
  misc_feature (1071)..(1071): n is a, c, g, or t
  misc_feature (1080)..(1081): n is a, c, g, or t
  misc_feature (1088)..(1106): n is a, c, g, or t
attagagaaattactatgagaggatcgcatcaccatcaccatcacggatcctatttaggtgacactatagaatcgtcgacccacgcgtccgaccagcagtgcataaacgaggcgcagcgggtgaagctgtcaagcccagagagagacgtggagagggacgtcttcctgtatagagcgtacctggcgcagaggaagttcggtgtggtcctggatgagatcaagccctcctcggcccctgagctccaggccgtgcgcatgtttgctgactacctcgcccacgagagtcggagggacagcatcgtggccgagctggaccgagagatgagcaggagcgtggacgtgaccaacaccaccttcctgctcatggccgcctccatctatctccacgaccagaacccggatgccgccctgcgtgcgctgcaccagggggacagcctggagtgcacagccatgacagtgcagatcctgctgaagctggaccgcctggacctcgcccggaaggagctgaagagaatgcaggacctggacgaggatgccaccctcacccagctcgccactgcctgggtcagcctggccacgggtggtgagaagctgcaggatgcctactacatcttccaggagatggctgacaagtgctcgcccaccctgctgctgctcaatgggcaggcggcctgccacatggcccagggccgctgggaggccgctgagggcctgctgcaggaggcgctagacaaggatagtggctacccggagacgctggtcaacctcatcgtcctgtcccagcacctgggcaagccccctgaggtgacaaaccgatacctgtcccagctgaaggatgcccacaggtcccatcccttcatcaaggagtaccaggccaaggagaacgactttgacaggctggtgctacagtacgctcccagcgcctgaggctggcccaaanctgtcaggaccatgaagccaggacagaggccagnagccagccntgcagcctnccccaccnggatccacctgcatncccttntgggggcaggancccccccnaccncccntntgttaataattttcactccnggggttccnnaaaaaannnnnnnnnnnnnnnnnnn

SEQ ID NO: 484 - DNA, 1036 bp, Homo Sapiens
  misc_feature (1)..(1): n is a, c, g, or t
  misc_feature (812)..(812): n is a, c, g, or t
  misc_feature (814)..(814): n is a, c, g, or t
  misc_feature (836)..(836): n is a, c, g, or t
  misc_feature (839)..(839): n is a, c, g, or t
  misc_feature (851)..(851): n is a, c, g, or t
  misc_feature (857)..(858): n is a, c, g, or t
  misc_feature (868)..(868): n is a, c, g, or t
  misc_feature (872)..(872): n is a, c, g, or t
  misc_feature (883)..(883): n is a, c, g, or t
  misc_feature (892)..(892): n is a, c, g, or t
  misc_feature (898)..(899): n is a, c, g, or t
  misc_feature (904)..(904): n is a, c, g, or t
  misc_feature (906)..(906): n is a, c, g, or t
  misc_feature (916)..(916): n is a, c, g, or t
  misc_feature (920)..(920): n is a, c, g, or t
  misc_feature (925)..(925): n is a, c, g, or t
  misc_feature (930)..(931): n is a, c, g, or t
  misc_feature (940)..(940): n is a, c, g, or t
  misc_feature (944)..(944): n is a, c, g, or t
  misc_feature (948)..(948): n is a, c, g, or t
  misc_feature (951)..(951): n is a, c, g, or t
  misc_feature (957)..(957): n is a, c, g, or t
  misc_feature (967)..(968): n is a, c, g, or t
  misc_feature (970)..(970): n is a, c, g, or t
  misc_feature (972)..(972): n is a, c, g, or t
  misc_feature (979)..(979): n is a, c, g, or t
  misc_feature (996)..(996): n is a, c, g, or t
  misc_feature (1007)..(1007): n is a, c, g, or t
  misc_feature (1009)..(1009): n is a, c, g, or t
  misc_feature (1013)..(1013): n is a, c, g, or t
  misc_feature (1018)..(1018): n is a, c, g, or t
  misc_feature (1023)..(1023): n is a, c, g, or t
  misc_feature (1030)..(1030): n is a, c, g, or t
ntatagagagaattactatgagaggatcgcatcaccatcaccatcacggatcctatttaggtgacactatagaatcgtcgacccacgcgtccgatacaaaagcagcgtcccctctcacagtatgtcctcccgacgggacacagactcggatacccaggatgccaatgactcaagctgtaagtcatctgagaggagcctcccggactgtacccctcaccccaactccatcagcatcgatgccggtccccggcaggcccccaagattgcccagatcaagcgcaacctctcctatggagacaacagcgaccctgccctagaggcgtcctcgctgcccccacccgacccctggctcgagacctcctccagctccccagcagagccggcacagccaggggcctgccgccgagacggctactggttcctaaagctactgcaggcagaaacagagcggctggaaggctggtgctgccagatggacaaggagaccaaagagaacaacctctctgaagaagtcttaggaaaagtcctcagtgctgtgggcagtgcccagctactgatgtcccagaaattccagcagttccggggcctctgtgagcaaaacttgaaccctgatgccaacccacgccccacagcccaggacctggcagggttctgggacctgctacagctgtccatcgaggatatcagcatgaagttcgatgaactctaccacctcaaggccaacagctggcagctggtggagacccccgagaagaggaaggaagagaagaaaccaccccctccggtcccaaagaagccagccaaatccaaancnggcagtgaagccgcgacaaggnctnaaaaggccagcngacaanncagcgccagnaggnccgcaagaaanctcctggcngtcaanncgggnanctttttgtgngggnagaanttcannccaccgganaagngcanaangcattnaaaatttttnntncngggaggncccaaaaccaggctttnaaaaaccttgncngaangaaanaaacnatttttnattctt

SEQ ID NO: 485 - DNA, 683 bp, Homo Sapiens
  misc_feature (4)..(10): n is a, c, g, or t
  misc_feature (14)..(14): n is a, c, g, or t
  misc_feature (16)..(18): n is a, c, g, or t
  misc_feature (603)..(603): n is a, c, g, or t
  misc_feature (610)..(610): n is a, c, g, or t
  misc_feature (624)..(624): n is a, c, g, or t
  misc_feature (631)..(631): n is a, c, g, or t
  misc_feature (634)..(634): n is a, c, g, or t
  misc_feature (649)..(649): n is a, c, g, or t
  misc_feature (656)..(656): n is a, c, g, or t
  misc_feature (659)..(659): n is a, c, g, or t
  misc_feature (663)..(664): n is a, c, g, or t
  misc_feature (667)..(667): n is a, c, g, or t
  misc_feature (669)..(669): n is a, c, g, or t
  misc_feature (679)..(680): n is a, c, g, or t
tttnnnnnnnattngnnnaaattactatgagaggatcgcatcaccatcaccatcacggatcctatttaggtgacactatagaatcgtcgacccacgcgtccgcccacgcgtccggcctggacggcttctctgtgttgatgagggccatgcagcagcaggtgcagaagctcaaggtcaaatcagcattcctgctgcagaacctgctggtgggccaccctgaacacaaagggaccctgtgctccatggggatggtccagcagctggtggccctggtgcggacagagcacagccccttccacgagcacgtgcttggagccctgtgcagcctggtgacagactttccgcagggtgtgcgcgagtgtcgggagccggaactgggcctggaggagctcctccgccaccgctgtcagctgctgcagcagcatgaggagtaccaggaggagctggagttctgtgaaaagctgctacagacctgtttctccagcccagcggacgacagcatggatcggtgaaaccaggtggcttcttgcccccttctccgtgggaaccccaggcctcttgcctccctccccacctacaaggccctctcccaagggatcgcanggcctangtgcctggacccanggtgtgncancccgtctctgtgcantccctgnaangggnnctnanaaaggcacanntcc

SEQ ID NO: 486 - DNA, 977 bp, Homo Sapiens
  misc_feature (656)..(656): n is a, c, g, or t
  misc_feature (667)..(667): n is a, c, g, or t
  misc_feature (669)..(669): n is a, c, g, or t
  misc_feature (676)..(676): n is a, c, g, or t
  misc_feature (743)..(743): n is a, c, g, or t
  misc_feature (747)..(747): n is a, c, g, or t
  misc_feature (750)..(750): n is a, c, g, or t
  misc_feature (774)..(774): n is a, c, g, or t
  misc_feature (791)..(791): n is a, c, g, or t
  misc_feature (794)..(794): n is a, c, g, or t
  misc_feature (804)..(804): n is a, c, g, or t
  misc_feature (812)..(812): n is a, c, g, or t
  misc_feature (815)..(815): n is a, c, g, or t
  misc_feature (823)..(823): n is a, c, g, or t
  misc_feature (825)..(827): n is a, c, g, or t
  misc_feature (831)..(831): n is a, c, g, or t
  misc_feature (836)..(836): n is a, c, g, or t
  misc_feature (843)..(843): n is a, c, g, or t
  misc_feature (847)..(847): n is a, c, g, or t
  misc_feature (849)..(849): n is a, c, g, or t
  misc_feature (856)..(856): n is a, c, g, or t
  misc_feature (869)..(869): n is a, c, g, or t
  misc_feature (871)..(871): n is a, c, g, or t
  misc_feature (874)..(874): n is a, c, g, or t
  misc_feature (877)..(877): n is a, c, g, or t
  misc_feature (884)..(884): n is a, c, g, or t
  misc_feature (886)..(886): n is a, c, g, or t
  misc_feature (890)..(890): n is a, c, g, or t
  misc_feature (904)..(904): n is a, c, g, or t
  misc_feature (909)..(909): n is a, c, g, or t
  misc_feature (918)..(918): n is a, c, g, or t
  misc_feature (925)..(925): n is a, c, g, or t
  misc_feature (937)..(938): n is a, c, g, or t
  misc_feature (945)..(945): n is a, c, g, or t
  misc_feature (950)..(950): n is a, c, g, or t
  misc_feature (952)..(952): n is a, c, g, or t
aatagagaaattactatgagaggatcgcatcaccattcaccattcacggatcctatttagggtgacactatagaatcgtcgacccacgcgtccgcggacgcgtgggggacaaatgtaagcaccacatatatcacatgccctgcagaccccaagaagacgctgggaattaaacttcctttccttgtcatgattatcaaaaacctgaagaagtattttaccttcgaagtgcaggtactagatgacaagaatgtgcgtcgtcgctttcgggcaagtaactaccagagcaccacccgggtcaaacccttcatctgcaccatgcccatgcggctggatgacggctggaaccagattcagttcaacttgctagacttcacacggcgagcatacggcaccaattacatcgagaccctcagagtgcagatccatgcaaattgtcgcatccgacgggtttacttctcagacagactctactcagaagatgagctgccggcagagttcaaactgtatctcccagttcagaacaaggcaaagcaataactggaattgtgactcgagggatagacccctggatgtgactcttctttttaaaaggaaactatgtggaggacgatgcaaaaacatatttatcttagtttgctctgctgtagttctgttanttatacttggngntgcttgncatggacaccggtgaacatgccgtaactctgtgactgcattgtaagtgcagtggggggtaagcagtnctgngantggcgcatgaacgctggaacttantcccccccctgccccantgnggggggaaanaccctttnccntgaacttncnnnaatnaaagntgggccntaangnaatcccnaacaaatatttcntnccnggngggttantnccanggttttaaaaaatnaaccnaaaaaaaangggaaanggcggggggccnnaaccccnaaaancngggaaaaaggaaaaaaagggggaaa

SEQ ID NO: 487 - DNA, 1134 bp, Homo Sapiens
  misc_feature (1)..(1): n is a, c, g, or t
  misc_feature (3)..(3): n is a, c, g, or t
  misc_feature (647)..(647): n is a, c, g, or t
  misc_feature (669)..(669): n is a, c, g, or t
  misc_feature (741)..(741): n is a, c, g, or t
  misc_feature (761)..(761): n is a, c, g, or t
  misc_feature (778)..(778): n is a, c, g, or t
  misc_feature (789)..(789): n is a, c, g, or t
  misc_feature (808)..(808): n is a, c, g, or t
  misc_feature (834)..(834): n is a, c, g, or t
  misc_feature (838)..(838): n is a, c, g, or t
  misc_feature (840)..(840): n is a, c, g, or t
  misc_feature (857)..(857): n is a, c, g, or t
  misc_feature (894)..(894): n is a, c, g, or t
  misc_feature (899)..(899): n is a, c, g, or t
  misc_feature (911)..(911): n is a, c, g, or t
  misc_feature (918)..(918): n is a, c, g, or t
  misc_feature (934)..(934): n is a, c, g, or t
  misc_feature (938)..(938): n is a, c, g, or t
  misc_feature (969)..(969): n is a, c, g, or t
  misc_feature (975)..(975): n is a, c, g, or t
  misc_feature (994)..(994): n is a, c, g, or t
  misc_feature (998)..(998): n is a, c, g, or t
  misc_feature (1000)..(1000): n is a, c, g, or t
  misc_feature (1002)..(1002): n is a, c, g, or t
  misc_feature (1008)..(1008): n is a, c, g, or t
  misc_feature (1015)..(1015): n is a, c, g, or t
  misc_feature (1020)..(1021): n is a, c, g, or t
  misc_feature (1044)..(1045): n is a, c, g, or t
  misc_feature (1049)..(1049): n is a, c, g, or t
  misc_feature (1057)..(1057): n is a, c, g, or t
  misc_feature (1064)..(1064): n is a, c, g, or t
  misc_feature (1071)..(1071): n is a, c, g, or t
  misc_feature (1076)..(1077): n is a, c, g, or t
  misc_feature (1079)..(1079): n is a, c, g, or t
  misc_feature (1082)..(1082): n is a, c, g, or t
  misc_feature (1085)..(1085): n is a, c, g, or t
  misc_feature (1089)..(1089): n is a, c, g, or t
  misc_feature (1093)..(1093): n is a, c, g, or t
  misc_feature (1104)..(1104): n is a, c, g, or t
  misc_feature (1108)..(1108): n is a, c, g, or t
  misc_feature (1125)..(1125): n is a, c, g, or t
  misc_feature (1128)..(1128): n is a, c, g, or t
nanttagagaaattactatgagaggatcgcatcaccatcaccatcacggatcctatttaggtgacactatagaatcgtcgacccacgcgtccggcgaggagccctcgcacgcgctagtctgcgagtgagcgctcagcccggcacctgttcctccagcgccgccgccttcccacccctcggacccgcgccgctcgcggcgcccgcccgttcctgcgatgaatccggccctaggcaaccagacggacgtggcgggcctgttcctggccaacagcagcgaggcgctggagcgagccgtgcgctgctgcacccaggcgtccgtggtgaccgacgacggcttcgcggagggaggcccggacgagcgtagcctgtacataatgcgcgtggtgcagatcgcggtcatgtgcgtgctctcactcaccgtggtcttcggcatcttcttcctcggctgcaatctgctcatcaagtccgagggcatgatcaacttcctcgtgaaggaccggaggccgtctaaggaggtggaggcggtggtcgtggggccctactgacccgccctctgcccccgcggcaaccgctcccacgcctgcccactttgctagcccggctgtgcccctcactatcagagactgggcgaagcaaacctgtcggantcaattatttctctcgacttcngcctttcggaaagaagcgaccggtttctccctcgccctctgaaagtcctcatgcctggcagtcggaagagancgcccagactctgaactcancaaaaagtggcaagaanaaggcgattanggcgcacaacttttggaanctgctacttacttggaatgcgggganaacnanaggtgcgaaagcccttntccacccgcaggtgggccaaactctgggggcaagtgnaaaanggcgggcaaggnaaaaaanccaccggcactgatcncctntgaccggaaaaaatgaactgtttaaaaaccnccccancaaaaatcttggggtttcnaaantncntgttcnggggggnttccnntttttctggtttcccccctggcnngganggaagggngaaaaanacttttnaattnnanggnccntttnaaangtttttttttntttnttttaaaaaaaagtttnaanaatttt

SEQ ID NO: 488 - DNA, 1238 bp, Homo Sapiens
  misc_feature (753)..(753): n is a, c, g, or t
  misc_feature (852)..(852): n is a, c, g, or t
  misc_feature (870)..(870): n is a, c, g, or t
  misc_feature (878)..(878): n is a, c, g, or t
  misc_feature (893)..(893): n is a, c, g, or t
  misc_feature (899)..(899): n is a, c, g, or t
  misc_feature (909)..(909): n is a, c, g, or t
  misc_feature (954)..(954): n is a, c, g, or t
  misc_feature (966)..(966): n is a, c, g, or t
  misc_feature (971)..(971): n is a, c, g, or t
  misc_feature (977)..(977): n is a, c, g, or t
  misc_feature (984)..(984): n is a, c, g, or t
  misc_feature (990)..(990): n is a, c, g, or t
  misc_feature (995)..(995): n is a, c, g, or t
  misc_feature (1003)..(1003): n is a, c, g, or t
  misc_feature (1006)..(1006): n is a, c, g, or t
  misc_feature (1024)..(1025): n is a, c, g, or t
  misc_feature (1033)..(1033): n is a, c, g, or t
  misc_feature (1035)..(1035): n is a, c, g, or t
  misc_feature (1037)..(1038): n is a, c, g, or t
  misc_feature (1044)..(1044): n is a, c, g, or t
  misc_feature (1046)..(1046): n is a, c, g, or t
  misc_feature (1057)..(1057): n is a, c, g, or t
  misc_feature (1082)..(1082): n is a, c, g, or t
  misc_feature (1087)..(1087): n is a, c, g, or t
  misc_feature (1092)..(1092): n is a, c, g, or t
  misc_feature (1102)..(1102): n is a, c, g, or t
  misc_feature (1105)..(1105): n is a, c, g, or t
  misc_feature (1113)..(1115): n is a, c, g, or t
  misc_feature (1123)..(1123): n is a, c, g, or t
  misc_feature (1127)..(1127): n is a, c, g, or t
  misc_feature (1151)..(1152): n is a, c, g, or t
  misc_feature (1154)..(1154): n is a, c, g, or t
  misc_feature (1184)..(1184): n is a, c, g, or t
  misc_feature (1197)..(1197): n is a, c, g, or t
  misc_feature (1201)..(1201): n is a, c, g, or t
  misc_feature (1203)..(1203): n is a, c, g, or t
  misc_feature (1210)..(1210): n is a, c, g, or t
  misc_feature (1227)..(1227): n is a, c, g, or t
  misc_feature (1231)..(1231): n is a, c, g, or t
  misc_feature (1234)..(1234): n is a, c, g, or t
attagagaaattactatgagaggatcgcatcaccatcaccatcacggatcctatttaggtgacactatagaatcgtcgacccacgcgtccgttaaggtgaaaagcactgaagttgagatcctagagaagtctcaaattgaagccattgcttcctcgttagcctcacagaatgaggttcctgcggcacccctggaagaactggcctacagacggtcgcttcgcgtggctctggacgttctgagcgagggctcgatttggagtcaagaaagctctgcagggacaggtagagctgaccggtctctgcgagggaagcccatggagcatgtctcctcgccctgtgattcgaactcctcatctcttccccgcggagacgtgttgggcagttccagacctcacaggaggaggccatgtgtgcaacaaagcctgtcaatttcgttcacttgtgaaaaggaccccgagtgcaaagtggaccacaagaaggggctcaggaaaagtgaaaacccaagaggcccgttggtcctcccagctggaggtggtgcccaagatgagagtgggtccagaatccaccacaaaaattggactcttgcaagtaagaggggaagaaactcagcgcagaaggctagcttgtgcctgaatggatcttccctttcagaggacgacacggagagagacatggggagcaaaggaggcagctgggcagccccgtccttgccctccggggtcagggaggacgatccctgtgccaacgctganggacacgaccccggtctgccgttgggcagcctcactgcgcccccagcccctgagccctcggcctgctcaaagcctggagaatgccctgcgaaaaaagangccgcgcctggatggcanccaaaagnccgcctgccgtgcanctggancccatggcancaggggccgcaccatcccccgggccggggccagggcccaaaaaantctgtgaccccncgcancacccncccgggntggggncccgncttccctnccnaagccttttgggggaatnnaaacaaantntnntttccntngcccggaattnccaaaaaacttggaaaaaaaaatgncccantcttnccaaaaaaanccnagggggtnnnaaattccnatgnggtttctatcctgggaggaaaaannanggaaaaaccaaggaacccccccaaaattcntttttaaaccccnaaancnccttttntttttaaaaaaaaaatnttanttntggc

SEQ ID NO: 489 - DNA, 1377 bp, Homo Sapiens
  misc_feature (1)..(1): n is a, c, g, or t
  misc_feature (897)..(897): n is a, c, g, or t
  misc_feature (942)..(942): n is a, c, g, or t
  misc_feature (944)..(944): n is a, c, g, or t
  misc_feature (950)..(950): n is a, c, g, or t
  misc_feature (964)..(964): n is a, c, g, or t
  misc_feature (971)..(971): n is a, c, g, or t
  misc_feature (973)..(973): n is a, c, g, or t
  misc_feature (1006)..(1006): n is a, c, g, or t
  misc_feature (1011)..(1011): n is a, c, g, or t
  misc_feature (1017)..(1017): n is a, c, g, or t
  misc_feature (1023)..(1023): n is a, c, g, or t
  misc_feature (1025)..(1025): n is a, c, g, or t
  misc_feature (1037)..(1037): n is a, c, g, or t
  misc_feature (1050)..(1050): n is a, c, g, or t
  misc_feature (1052)..(1052): n is a, c, g, or t
  misc_feature (1055)..(1055): n is a, c, g, or t
  misc_feature (1061)..(1062): n is a, c, g, or t
  misc_feature (1072)..(1072): n is a, c, g, or t
  misc_feature (1077)..(1077): n is a, c, g, or t
  misc_feature (1083)..(1083): n is a, c, g, or t
  misc_feature (1086)..(1086): n is a, c, g, or t
  misc_feature (1095)..(1095): n is a, c, g, or t
  misc_feature (1119)..(1119): n is a, c, g, or t
  misc_feature (1125)..(1125): n is a, c, g, or t
  misc_feature (1143)..(1143): n is a, c, g, or t
  misc_feature (1145)..(1145): n is a, c, g, or t
  misc_feature (1151)..(1151): n is a, c, g, or t
  misc_feature (1157)..(1157): n is a, c, g, or t
  misc_feature (1160)..(1160): n is a, c, g, or t
  misc_feature (1167)..(1167): n is a, c, g, or t
  misc_feature (1175)..(1175): n is a, c, g, or t
  misc_feature (1215)..(1215): n is a, c, g, or t
  misc_feature (1217)..(1218): n is a, c, g, or t
  misc_feature (1224)..(1224): n is a, c, g, or t
  misc_feature (1231)..(1231): n is a, c, g, or t
  misc_feature (1245)..(1245): n is a, c, g, or t
  misc_feature (1255)..(1255): n is a, c, g, or t
  misc_feature (1258)..(1258): n is a, c, g, or t
  misc_feature (1260)..(1261): n is a, c, g, or t
  misc_feature (1264)..(1264): n is a, c, g, or t
  misc_feature (1281)..(1282): n is a, c, g, or t
  misc_feature (1286)..(1286): n is a, c, g, or t
  misc_feature (1300)..(1300): n is a, c, g, or t
  misc_feature (1303)..(1303): n is a, c, g, or t
  misc_feature (1310)..(1310): n is a, c, g, or t
  misc_feature (1315)..(1315): n is a, c, g, or t
  misc_feature (1320)..(1320): n is a, c, g, or t
  misc_feature (1345)..(1345): n is a, c, g, or t
  misc_feature (1350)..(1350): n is a, c, g, or t
  misc_feature (1353)..(1353): n is a, c, g, or t
  misc_feature (1357)..(1357): n is a, c, g, or t
  misc_feature (1372)..(1372): n is a, c, g, or t
naatagagaaattactatgagaggatcgcatcaccatcaccatcacggatcctatttaggtgacactatagaatcgtcgacccacgcgtccgcaggtagaaaactggtgtcatcagctgtttctcccagcatcatacctcaagaggatccttcccagcagttcctgcagcagagccttgaaagagtgtatagtcttcagcacttggaccctcagggagcccaggagctgctggaattcaccatcagggatctgcaaagacttggagaacttcaatctgaattggcaggagtagctgatttctctgccacctatcttcgctgtcaactacttctcatcaaggccttgcagaaaagttgtggaatgtagctgcccctttgtatttgaagcagagtgatttggcctcagcagcagcgaaacagattatggaagagacctacaaaatggaattcatgtacagtggtgtggagaataagcaggtggtgattatacatcacatgaggctgcaggccaaagctttgcaacttatagtaacagcacgaactacacgaggacttgaccccttatttgggatgtgtgaaaaatttttacaggaagtagacttttttcagaggtatttcatcgctgatttgccccacttgcaggacagctttgtggacaaactccttgaccttatgccccgactcatgacatccaaacctgcagaagtggtcaaaattctacagaccatgctgcgacagagtgcctttctgcatctcccgcttccagagcagatccacaaagcctcagccaccatcatcgagccagcgggcgagtcagacaaccctttgcggtttacctctgggttggtggttgccctggatgttgatgcaaccctggagcatgtgcaggatcctcanaacactgttaaggtccaggtctaatatccagatggccaggctcanangattcnccccaagcctgcanacttccngnaatcctggcccagggcggcaccggctcatcacncaggnttatcnctcccncnccgcttggacanaggcctgccaggngnaantgaagnntgctgctggncctanactccnggnccccattcnaaaaggcccctgaagggagggggngaaagntccccccgggggaaaccncnatcggnggcccnttnccttcanaagccggnaaaatttaataatgcccaacctgcccgggctaggaaaaananncttccnaccgggncaaaaggccccttnagggccaaangancnnccngaacccctccccgaatnngggnagcttaagaatggnccntcccccntcggnaaaancgaaaatttttctttaaaaaaaaancttanttntccntccccgccaaagggnaaacc

SEQ ID NO: 490 - DNA, 1341 bp, Homo Sapiens
atggaaactcaggctgatctcgtatctcaggaacctcaggccctgcttgacagtgctcttccttcaaaagttcctgccttttccgacaaggacagcctgggggatgagatgttggcggctgcgctcctaaaggccaagtcccaggagctggtaacctttgaggatgtagctgtgtacttcatccggaaggagtggaagcgtttggaacctgctcagagggacctctatagagatgtgatgctggagaattacgggaatgtgttctcactggatcgtgagaccaggactgaaaatgatcaagaaatttctgaagacacaagatcacatggggtcctactgggaagatttcaaaaggatatttctcagggtctcaagtttaaagaagcctatgaacgagaagtcagtctgaaaaggccgctggggaactcccctggagaaagactgaacaggaaaatgccagattttggtcaagtgacagttgaggagaagctaacccccaggggagagagaagcgagaaatataatgattttgggaacagcttcactgtgaattccaaccttatctcacatcagagactccccgtgggagacagaccccataagtgtgatgaatgtagcaagagctttaatcgaacttcagaccttattcaacatcagagaatccacactggggaaaagccctatgaatgtaatgagtgtgggaaggccttcagccagagctcacaccttattcagcatcagagaatccacactggggaaaaaccttatgaatgtagtgattgtgggaaaaccttcagctgtagctctgccctcattctgcatcggaggatccacacgggggagaaaccctatgaatgtaatgagtgtgggaagaccttcagctggagctccaccctcacccaccatcagagaatccacactggtgagaaaccctacgcctgcaatgaatgtgggaaggccttcagcaggagctcaacccttattcaccatcagagaatccacactggagaaaaaccctatgaatgtaatgaatgtgggaaagccttcagccagagctcacacctctatcagcaccagagaatccacactggagagaagccctacgaatgtatggaatgtggaggaaagtttacctacagttcaggccttattcagcatcaaagaatccacaccggggagaacccctatgaatgtagtgagtgtgggaaagccttcaggtacagctcggctcttgttcgccatcagagaattcacactggagagaagcctttgaatgggatcggcatgagcaaaagctccctcagagttacgaccgagttaaatatcagagagtccacgtga

SEQ ID NO: 491 - DNA, 1872 bp, Homo Sapiens
atgccctccgacctggccaagaagaaggcagccaaaaagaaggaggctgccaaagctcgacagcggcccagaaaaggacatgaagaaaatggagatgttgtcacagaaccacaggtggcagagaagaatgaggccaatggcagagagaccacagaagtagatttgctgaccaaggagctagaggactttgagatgaagaaagctgctgctcgagctgtcactggcgtcctggcctctcaccccaacagtactgatgttcacatcatcaacctctcacttacctttcatggtcaagagctgctcagtgacaccaaactggaattaaactcaggccgtcgttatggcctcattggtttaaatggaattggaaagtccatgctgctctctgctattgggaagcgtgaagtgcccatccctgagcacatcgacatctaccatctgactcgagagatgccccctagtgacaagacacccttgcattgtgtgatggaagtcgacacagagcgggccatgctggagaaagaggcagagcggctggctcatgaggatgcggagtgtgagaagctcatggagctctacgagcgcctggaggagctggatgccgacaaggcagagatgagggcctcgcggatcttgcatggactgggtttcacacctgccatgcagcgcaagaagctaaaagacttcagtgggggctggaggatgagggttgcccttgccagagccctctttattcggcccttcatgctgctcctggatgagcctaccaaccacctggacctagatgcttgcgtgtggttggaagaagaactaaaaacttttaagcgcatcttggtcctcgtctcccattcccaggattttctgaatggtgtctgtaccaatatcattcacatgcacaacaagaaactgaagtattatacgggtaattatgatcagtacgtgaagacgcggctagagctggaggagaaccagatgaagaggtttcactgggagcaagatcagattgcacacatgaagaactacattgcgaggtttggtcatggcagtgccaagctggcccggcaggcccagagcaaggagaagacgctacagaaaatgatggcatcaggactgacagagagggtcgtgagcgataagacactgtcattttatttcccaccatgtggcaagatccctccacctgtcattatggtgcaaaatgtgagcttcaagtatacaaaagatgggccttgcatctacaataatctagaatttggaattgaccttgacacacgagtggctctggtagggcccaatggagcagggaagtcaactcttctgaagctgctaactggagagctactacccacagatggcatgatccgaaaacactctcatgtcaagatagggcgttaccatcagcatttacaagagcagctggacttagatctctcacctttggagtacatgatgaagtgctacccagagatcaaggagaaggaagaaatgaggaagatcattgggcgatacggtctcactgggaaacaacaggtgagcccaatccggaacttgtcagacgggcagaagtgccgagtgtgtctggcctggctggcctggcagaacccccacatgctcttcctggatgaacccaccaatcacctggatatcgagaccatcgacgccctggcagatgccatcaatgagtttgagggtggtatgatgctggtcagccatgacttcagactcattcagcaggttgcacaggaaatttgggtctgtgagaagcagacaatcaccaagtggcctggagacatcctggcttacaaggagcacctcaagtccaagctggtggatgaggagccccagctcaccaagaggacccacaacgtgtga

SEQ ID NO: 492 - DNA, 2346 bp, Homo Sapiens
atgtggggcctggtgaggctcctgctggcctggctgggtggctggggctgcatggggcgtctggcagccccagcccgggcctgggcagggtcccgggaacacccagggcctgctctgctgcggactcgaaggagctgggtctggaaccagttctttgtcattgaggaatatgctggtccagagcctgttctcattggcaagctgcactcggatgttgaccggggagagggccgcaccaagtacctgttgaccggggagggggcaggcaccgtatttgtgattgatgaggccacaggcaatattcatgttaccaagagccttgaccgggaggaaaaggcgcaatatgtgctactggcccaagccgtggaccgagcctccaaccggcccctggagcccccatcagagttcatcatcaaagtgcaagacatcaacgacaatccacccatttttccccttgggccctaccatgccaccgtgcccgagatgtccaatgtcgggacatcagtgatccaggtgactgctcacgatgctgatgaccccagctatgggaacagtgccaagctggtgtacactgttctggatggactgcctttcttctctgtggacccccagactggagtggtgcgtacagccatccccaacatggaccgggagacacaggaggagttcttggtggtgatccaggccaaggacatgggcggccacatgggggggctgtcaggcagcactacggtgactgtcacgctcagcgatgtcaacgacaacccccccaagttcccacagagcctataccagttctccgtggtggagacagctggacctggcacactggtgggccggctccgggcccaggacccagacctgggggacaacgccctgatggcatacagcatcctggatggggaggggtctgaggccttcagcatcagcacagacttgcagggtcgagacgggctcctcactgtccgcaagcccctagactttgagagccagcgctcctactccttccgtgtcgaggccaccaacacgctcattgacccagcctatctgcggcgagggcccttcaaggatgtggcctctgtgcgtgtggcagtgcaagatgccccagagccacctgccttcacccaggctgcctaccacctgacagtgcctgagaacaaggccccggggaccctggtaggccagatctccgcggctgacctggactcccctgccagcccaatcagatactccatcctcccccactcagatccggagcgttgcttctctatccagcccgaggaaggcaccatccatacagcagcacccctggatcgcgaggctcgcgcctggcacaacctcactgtgctggctacagagctcgacagttctgcacaggcctcgcgcgtgcaagtggccatccagaccctggatgagaatgacaatgctccccagctggctgagccctacgatacttttgtgtgtgactctgcagctcctggccagctgattcaggtcatccgggccctggacagagatgaagttggcaacagtagccatgtctcctttcaaggtcctctgggccctgatgccaactttactgtccaggacaaccgagatggctccgccagcctgctgctgccctcccgccctgctccaccccgccatgccccctacttggttcccatagaactgtgggactgggggcagccggcgctgagcagcactgccacagtgactgttagtgtgtgccgctgccagcctgacggctctgtggcatcctgctggcctgaggctcacctctcagctgctgggctcagcaccggcgccctgcttgccatcatcacctgtgtgggtgccctgcttgccctggtggtgctcttcgtggccctgcggcggcagaagcaagaagcactgatggtactggaggaggaggacgtccgagagaacatcatcacctacgacgacgagggcggcggcgaggaggacaccgaggccttcgacatcacggccttgcagaacccggacggggcggcccccccggcgcccggccctcccgcgcgccgagacgtgttgccccgggcccgggtgtcgcgccagcccagaccccccggccccgccgacgtggcgcagctcctggcgctgcggctccgcgaggcggacgaggaccccggcgtacccccgtacgactcggtgcaggtgtacggctacgagggccgcggctcctcttgcggctccctcagctccctgggctccggcagcgaagccggcggcgcccccggccccgcggagccgctggacgactggggtccgctcttccgcaccctggccgagctgtatggggccaaggagcccccggccccctga

SEQ ID NO: 493 - DNA, 1398 bp, Homo Sapiens
atgactcctgtgaggatgcagcactccctggcaggtcagacctatgccgtgcccttcatccagccagacctgcggcgagaggaggccgtccagcagatggcggatgccctgcagtacctgcagaaggtctctggagacatcttcagcaggatctcccagcaggtagagcagagccggagccaggtgcaggccattggagagaaggtctccttggcccaggccaagattgagaagatcaagggcagcaagaaggccatcaaggtgttctccagtgccaagtaccctgctccagggcgcctgcaggaatatggctccatcttcacgggcgcccaggaccctggcctgcagagacgcccccgccacaggatccagagcaagcaccgccccctggacgagcgggccctgcaggagaagctgaaggactttcctgtgtgcgtgagcaccaagccggagcccgaggacgatgcagaagagggacttgggggtcttcccagcaacatcagctctgtcagctccttgctgctcttcaacaccaccgagaacctgtacaagaagtatgtcttcctggaccccctggctggtgctgtaacaaagacccatgtgatgctgggggcagagacagaggagaagctgtttgatgcccccttgtccatcagcaagagagagcagctggaacagcaggtcccagagaactacttctatgtgccagacctgggccaggtgcctgagatccatgttccatcctacctgcctgacctgcccggcattgccaacgacctcatgtacagtgccgacctgggccccggcattgccccctctgcccctggcaccattccagaactgcccaccttccacactgaggtagccgagcctctcaaggtagacctacaagatggggtactaacaccacccccaccgcccccaccaccacccccagctcctgaggtgctggccagtgcacccccactcccaccctcaaccgcggcccctgtaggccaaggcgccaggcaggacgacagcagcagcagcgcatctccttcagtccagggagctcccagggaagtggtcgacccctccggtggctgggccactctgctagagtccatccgccaagctgggggcatcggcaaggccaagctgcgcagcatgaaggagcgaaagctggagaagcagcagcagaaggagcaggagcaagtgagagccacgagccaaggtgggcacttgatgtcggatctcttcaacaagctggtcatgaggcgcaagggcatctctgggaaaggacctggggctggtgaggggcccggaggagcctttgtccgcgtgtcagactccatccctcctttgccgccaccgcagcagccacaggcagaggaggacgaggacgactgggaatcgtag

SEQ ID NO: 494 - DNA, 441 bp, Homo Sapiens
atgcccctggacccctaccactctgtgacgtgggggcacgcgcagggatcccatcattttgtgtttggggagctcagagtgcgcccaatcttggaatctttaagggatgagccagacccagacccgcggccttctagagagggtccggcagggagggtcggcgccctggcccggggtgggccggagccctgtgatgctgcatcgcccccaggaggagccagctgtgccccagagttggcgcggccgagagaggacaagagcgcgcagcaggcgaagctggagggcgggactcgactttgttgtcgctgcccggaggagtcgagactggtacccggaggagctgtctcaccaggagaccacgtcctggaagtgtccgggactcgcgggacctgtggctgcagaccccgccggcacgcaggcccagagctggcgcactcctga

SEQ ID NO: 495 - DNA, 2247 bp, Homo Sapiens
atgtcgcagtctgatgaccgggattccaagcgggattcccttgaggagggggagctgagagatcaccgcatggagatcacaataaggaactccccgtatagaagagaagactctatggaagacagaggagaagaagatgattctttggccatcaaaccaccccagcaaatgtctcggaaagaaaaagttcatcacagaaaagatgaaaagagaaaagagaaacgtaggcatcgtagccattcagcagaaggggggaagcatgctagagtgaaagaaaaagaaagagagcacgaacgtcggaaacgacatcgagaagaacaggataaagctcgccgggaatgggaaagacagaagagaagggaaatggcaagggagcattccaggagagaaagggaccgcttggagcagttagaaaggaagcgggagcgggagcgcaagatgcgggagcagcagaaggagcagcgggagcagaaggagcgcgagcggcgggcggaggagcggcgcaaggagcgggaggcccgcagggaagtgtctgcacatcaccgaacgatgagagaggactacagcgacaaagtgaaagccagccactggagtcgcagcccgcctcggccgccgcgggagcggttcgagttgggagacggccggaagccagtaaaagaagagaaaatggaagaaagggacctgctgtccgacttacaggacatcagcgacagcgagaggaagaccagctcggccgagtcctcgtcagcagaatcaggctcaggttctgaggaagaagaggaggaggaggaagaggaggaggaggaagggagcaccagtgaagaatcagaggaggaggaggaggaagaggaagaggaggaggaggagaccggcagcaactctgaggaggcatcagagcagtctgccgaagaagtaagtgaggaagaaatgagtgaagatgaagaacgagaaaatgaaaaccacctcttggttgttccagagtcacggttcgaccgagattccggggagagtgaagaagcagaggaagaagtgggtgagggaacgccgcagagcagcgccctgacagagggcgactatgtgcccgactcccctgccctgtcgcccatcgagctcaagcaggagctgcccaagtacctgccggccctgcagggctgccggagcgtcgaggagttccagtgcctgaacaggatcgaggagggcacctatggagtggtctacagagcaaaagacaagaaaacagatgaaattgtggctctaaagcggctgaagatggagaaggagaaggagggcttcccgatcacgtcgctgagggagatcaacaccatcctcaaggcccagcatcccaacatcgtcaccgttagagagattgtggtgggcagcaacatggacaagatctacatcgtgatgaactatgtggagcacgacctcaagagcctgatggagaccatgaaacagcccttcctgccaggggaggtgaagaccctgatgatccagctgctgcgtggggtgaaacacctgcacgacaactggatcctgcaccgtgacctcaagacgtccaacctgctgctgagccacgccggcatcctcaaggtgggtgacttcgggctggcgcgggagtacggatcccctctgaaggcctacaccccggtcgtggtgaccctgtggtaccgcgccccagagctgctgcttggtgccaaggaatactccacggccgtggacatgtggtcagtgggttgcatcttcggggagctgctgactcagaagcctctgttccccgggaagtcagaaatcgatcagatcaacaaggtgttcaaggatctggggacccctagtgagaaaatctggcccggctacagcgagctcccagcagtcaagaagatgaccttcagcgagcacccctacaacaacctccgcaagcgcttcggggctctgctctcagaccagggcttcgacctcatgaacaagttcctgacctacttccccgggaggaggatcagcgctgaggacggcctcaagcatgagtatttccgcgagacccccctccccatcgacccctccatgttccccacgtggcccgccaagagcgagcagcagcgtgtgaagcggggcaccagcccgaggccccctgagggaggcctgggctacagccagctgggtgacgacgacctgaaggagacgggcttccaccttaccaccacgaaccagggggcctctgccgcgggccccggcttcagcctcaagttctga

SEQ ID NO: 496 - DNA, 981 bp, Homo Sapiens
atggccccggccgccgccagccccccggaggtgatccgcgcggcgcagaaggacgagtactaccgcggtgggctgcggagcgcggcgggcggcgccctgcacagcctggcgggtgcgaggaagtggctggagtggaggaaggaggttgagctgctctcagatgtggcctactttggcctcaccacacttgcaggctaccagaccctgggggaggagtacgtcagcatcatccaggtggacccatcgcggatacatgtgccctcctcgctgcgccgtggcgtgctggtgacactgcatgccgtcctgccctacctgctggacaaggccctgctccccctggagcaggagctgcaggctgaccccgacagtgggcgacccttgcaggggagcctggggccaggtgggcgtggctgctcaggggcgcggcgctggatgcgtcaccacacggccaccctgactgagcagcagaggagggcgctgctgcgggcggtcttcgtcctcagacagggcctcgcctgcctccagcggctacatgttgcctggttttacatccacggtgtcttctaccacctggccaagaggctcacggggatcacgtacctccgtgtccgcagcctgcccggagaggacctgagggcccgtgttagctacaggctgctgggggtcatctcactgctgcacctggtgctgtccatggggctgcagctgtacggtttcaggcagcggcagcgagccaggaaggagtggaggctgcaccgcggcctgtctcaccgcagggcctccttggaggagagagccgtttccagaaaccccctgtgcaccctgtgcctggaggagcgcaggcacccaacagccacgccctgcggccacctgttctgctgggagtgcatcaccgcgtggtgcagcagcaaggcggagtgtcccctctgccgggagaagttccctccccagaagctcatctaccttcggcactaccgctga

SEQ ID NO: 497 - DNA, 2367 bp, Homo Sapiens
atggacgtttccgggcaagagaccgactggcggagcaccgccttccggcagaagctggtcagtcaaatcgaggatgccatgaggaaagctggtgtggcacacagtaaatccagcaaggatatggagagccatgttttcctgaaggccaagacccgggacgaatacctttctctcgtggccaggctcattatccattttcgagacattcataacaagaaatctcaagcttccgtcagtgatcctatgaatgcactccagagcctgactggcggacctgctgcgggagccgctggaattggcatgcctcctcggggcccgggacagtctctgggcgggatgggtagccttggtgccatgggacagccaatgtctctctcagggcagccgcctcctgggacctcggggatggcccctcacagcatggctgtcgtgtctacggcaactccacagacccagctgcagctccagcaggtggcgctgcagcagcagcagcaacagcagcagttccagcagcagcagcaggcggcgctacagcagcagcagcagcagcagcaacagcagcagttccaggctcagcagagtgccatgcagcagcagttccaagcagtagtgcagcagcagcagcagctccagcagcagcagcagcagcagcagcatctaattaaattgcatcatcaaaatcagcaacagatacagcagcagcaacagcagctgcagcgaatagcacagctgcagctccaacaacagcaacagcagcagcagcagcagcagcagcagcagcagcaggctttgcaggcccagccaccaattcagcagccaccgatgcagcagccacagcctccgccctcccaggctctgccccagcagctgcagcagatgcatcacacacagcaccaccagccgccaccacagccccagcagcctccagttgctcagaaccaaccatcacaactcccgccacagtcgcagacccagcctttggtgtcacaggcgcaagctctccctggacaaatgttgtatacccaaccaccactgaaatttgtccgagctccgatggtggtgcagcagcccccagtgcagccccaggtgcagcagcagcagacagcagtacagacagctcaggctgcccagatggtggctcccggagtccagatgatcacggaagccttggcccaaggtgggatgcacataagagcccggttcccgcctaccaccgctgtgtccgccatcccgtcaagctccatccctttgggcagacagcccatggcacaggtcagccagagcagcctccccatgctgtcctcgccgtcaccgggccagcaggtgcagaccccgcagtcgatgccccctcccccccagccgtccccgcagcccggccagcccagctcacagcccaactccaacgtcagctctggccctgccccatctcccagtagcttcctgcccagcccctcaccgcagccctcccagagcccagtgacggcgcggaccccacagaacttcagtgtcccctcacctggacctttaaacacacctgtgaaccccagctctgtcatgagcccagctggctccagccaggctgaggagcagcagtacctggacaagctgaagcagctgtcgaagtacatcgagcccctgcgccgcatgatcaacaagatcgacaagaacgaagacagaaaaaaggacctgagtaagatgaagagccttctggacattctgacagacccctcgaagcggtgtcccctgaagaccttgcaaaagtgtgagatcgccctggagaaactcaagaatgacatggcggtgcccactcccccaccgcccccggtgccaccgaccaaacagcagtacctatgccagccgctcctggatgccgtcctggccaacatccgctcacctgtcttcaaccattccctgtaccgcacattcgttccagccatgaccgccattcacggcccacccatcacggccccagtggtgtgcacccggaagcgcaggcttgaggatgatgagcggcagagcatccccagtgtgctccagggtgaggtggccaggctggaccccaagttcctggtaaacctggacccttctcactgcagcaacaatggcactgtccacctgatctgcaagctggatgacaaggacctcccaagtgtgccaccactggagctcagtgtgcccgctgactatcctgcccaaagcccgctgtggatagaccggcagtggcagtacgacgccaaccccttcctccagtcggtgcaccgctgcatgacctccaggctgctgcagctcccggacaagcactcggtcaccgccttgctcaacacctgggcccagagcgtccaccaggcctgcctctcagccgcctag

SEQ ID NO: 498 - DNA, 1968 bp, Homo Sapiens
atggttttgtacacgaccccctttcctaacagctgtctgtccgccctgcactgtgtgtcctgggcccttatctttccatgctactggctggtggaccggctcgctgcctccttcatacccaccacctacgagaagcgccagcgggcagacgacccgtgctgcctgcagctgctctgcactgccctcttcacgcccatctacctggccctcctggtggcctcgctgccctttgcgtttctcggctttctcttctggtccccactgcagtcggcccgccggccctacatctattcacggctggaagacaagggcctggccggtggggcagccctgctcagtgaatggaagggcacggggcctggcaaaagcttctgctttgccactgccaacgtctgcctcctgcccgactcactcgccagggtcaacaacctttttaacacccaagcgcgggccaaggagatcgggcagagaatccgcaatggggccgcccggccccagatcaaaatttacatcgactcccccaccaatacctccatcagcgccgctagcttcagcagcctggtgtcaccacagggcggcgatggggtggcccgggccgtccccgggagcattaagaggacagcctctgtggagtacaagggtgacggtgggcggcaccccggtgacgaggctgccaacggcccagcctctggggaccctgtcgacagcagcagcccggaggatgcctgcatcgtgcgcatcggtggcgaggagggcggccggccacctgaagctgacgaccctgtgcctgggggccaggccaggaacggagctggcgggggcccaaggggccagacgcccaaccataatcagcaggacggggattcagggagcctgggcagcccctcggcctcccgggagtccctggtgaaggggcgagctgggccagacaccagtgccagcggggagccaggtgccaacagcaagctcctgtacaaggcctcggtggtgaagaaggcggctgcacgcaggaggcggcaccccgacgaggccttcgaccatgaggtctccgccttcttccccgccaacctggacttcctgtgcctgcaggaggtgtttgacaagcgagcagccaccaaattgaaagagcagctgcacggctacttcgagtacatcctgtacgacgtcggggtctacggctgccagggctgctgcagcttcaagtgtctcaacagcggcctcctctttgccagccgctaccccatcatggacgtggcctatcactgttaccccaacaagtgtaacgacgatgccctggcctctaagggagctctgtttctcaaggtgcaggtgggaagcacacctcaggaccaaagaatcgtcgggtacatcgcctgcacacacctgcatgccccgcaagaggacagcgccatccggtgtgggcagctggacctgcttcaggactggctggctgatttccgaaaatctacctcctcgtccagcgcagccaaccccgaggagctggtggcatttgacgtcgtctgtggagatttcaactttgataactgctcctctgacgacaagctggagcagcaacactccctgttcacccactacagggacccctgccgcctggggcctggtgaggagaagccgtgggccatcggtactctgctggacacgaacggcctgtacgatgaggatgtgtgcacccccgacaacctgcagaaggtcctggagagtgaggagggccgcagggagtacctggcgtttcccaccagcaagagctcgggccagaaggggcggaaggagctgctgaagggcaacggccggcgcatcgactacatgctgcatgcagaggaggggctgtgcccagactggaaggccgaggtggaagaattcagttttatcacccagctgtccggcctgacggaccacctgccagtagccatgcgactgatggtgtcttcgggggaggaggaggcatag

SEQ ID NO: 499 - DNA, 1421 bp, Homo Sapiens
gtcggcacaaggtgctgccccagctgctgaccgccttcgagttcggcaatgctggggccgttgtcctcacgcccctcttcaaggtgggcaagttcctgagcgctgaggagtatcagcagaagatcatccctgtggtggtcaagatgttctcatccactgaccgggccatgcgcatccgcctcctgcagcagatggagcagttcatccagtaccttgacgagccaacagtcaacacccagatcttcccccacgtcgtacatggcttcctggacaccaaccctgccatccgggagcagacggtcaagtccatgctgctcctggccccaaagctgaacgaggccaacctcaatgtggagctgatgaagcactttgcacggctacaggccaaggatgaacagggccccatccgctgcaacaccacagtctgcctgggcaaaatcggctcctacctcagtgctagcaccagacacagggtccttacctctgccttcagccgagccactagggacccgtttgcaccgtcccgggttgcgggtgtcctgggctttgctgccacccacaacctctactcaatgaacgactgtgcccagaagatcctgcctgtgctctgcggtctcactgtagatcctgagaaatccgtgcgagaccaggccttcaaggccattcggagcttcctgtccaaattggagtctgtgtcggaggacccgacccagctggaggaagtggagaaggatgtccatgcagcctccagccctggcatgggaggagccgcagctagctgggcaggctgggccgtgaccggggtctcctcactcacctccaagctgatccgttcgcacccaaccactgccccaacagaaaccaacattccccaaagacccacgcctgaaggagttcctgccccagcccccacccctgttcctgccacccctacaacctcaggccactgggagacgcaggaggaggacaaggacacagcagaggacagcagcactgctgacagatgggacgacgaagactggggcagcctggagcaggaggccgagtctgtgctggcccagcaggacgactggagcaccgggggccaagtgagccgtgctagtcaggtcagcaactccgaccacaaatcctccaaatccccagagtccgactggagcagctgggaagctgagggctcctgggaacagggctggcaggagccaagctcccaggagccacctcctgacggtacacggctggccagcgagtataactggggtggcccagagtccagcgacaagggcgaccccttcgctaccctgtctgcacgtcccagcacccaggacaggtcaaggctgagctggcccggaagaagcgcgaggagcggcggcgggagatggaggccaaacgcgccgagaggaaggtggccaagggccccatga

SEQ ID NO: 500 - DNA, 2163 bp, Homo Sapiens
atgccaccaccgtcagacattgtcaaagtggccattgagtggccaggtgctaacgcccagctccttgaaatcgaccagaaacggcccctggcatccattatcaaggaagtttgtgatgggtggtcgttgccaaacccagagtattataccctccgttatgcagatggtcctcagctgtacatcaccgaacagactcgcagtgacattaagaatgggacaatcttacaactggctatctccccgtcccgggctgcacgccagctgatggagaggacccagtcatccaacatggagacccggctggatgccatgaaggagctggccaagctctctgccgacgtgactttcgctactgagttcatcaacatggatggcatcattgtgctgacaaggctcgtggaaagtggaaccaagctcttgtcccactacagtgagatgctggcattcaccctgactgccttcctagagctcatggaccatggcattgtctcctgggacatggtttcaatcacctttattaagcagattgcagggtatgtgagccagcccatggtggacgtgtcaatccttcagaggtccctggccatcctggagagcatggtcttgaacagccagagtctgtaccagaagatagccgaggaaatcaccgtgggacagctcatctcacacctccaggtctccaaccaggagattcagacctacgccattgcactgattaatgcactttttctgaaggctcctgaggacaaacgacaggatatggcaaatgcatttgcacagaagcatctccggtctataatcctgaatcatgtgatccgagggaaccgccccatcaaaactgagatggcccatcagctatatgtccttcaagtcctaacctttaaccttctggaagaaaggatgatgaccaagatggaccccaatgaccaggctcaaagggacatcatatttgaactgaggaggattgcatttgacgcagagtctgatcctagcaatgcccctgggagtgggaccgaaaaacgcaaagccatgtacacaaaggactacaaaatgctgggatttaccaaccacatcaatccagccatggactttacccagactcctcctggaatgctggccttggacaacatgctgtacttggctaaagtccaccaggacacctacatccggattgtcttggagaacagtagccgggaagacaaacatgaatgcccctttggccgcagtgccattgagctcaccaaaatgctctgtgaaatcctgcaggttggggaactaccaaatgaaggacgcaatgactaccacccgatgttctttacccatgaccgagcctttgaagagctctttggaatctgcatccagctgttgaacaagacctggaaggagatgagggcaacagcagaggacttcaacaaggttatgcaagtcgtccgagagcaaatcactcgagctttgccctccaaacccaactctttggatcagttcaagagcaaattgcgtagcctgagttactctgagattctacgactgcgccagtctgagaggatgagtcaggatgacttccagtccccgccaattgtggagctgagggagaagatccagcccgagatccttgagctgatcaagcagcagcgcctgaaccggctctgtgagggcagcagcttccgaaagattgggaaccgccgaaggcaagaacggttctggtactgccggttggcactgaaccacaaggtccttcactatggtgacttggatgacaacccacaaggggaggtgacatttgaatccctgcaggagaaaattcctgttgcagacattaaggccattgtcactgggaaagattgtccccacatgaaagagaaaagtgctctgaaacagaacaaggaggtgttggaattggccttctccatcctgtatgaccctgatgagaccttaaacttcatcgcacctaataaatatgagtactgcatctggattgatggcctcagtgcccttctggggaaggacatgtccagtgagctgaccaagagtgacctggacaccctgctgagcatggagatgaagctgcggctcctggacctggagaacatccagattcccgaagccccaccccccatccccaaggagcccagcagctatgactttgtctatcactatggctga

SEQ ID NO: 501 - DNA, 2814 bp, Homo Sapiens
atgctcctgtaccgaggggcccccgccggccctggcgcgccgggctgcgggctggcccggcccggcggcggcccgcaggccttcgggatccgcctgagcacgatgagcccccgctacctccagagcaactccagcagccacacgcgacccttcagtgccatcgcggagctgctagataatgctgtagatccagatgtatctgccaggacggtctttatagatgttgaggaggtcaagaataaatcttgtttgacctttaccgatgatggatgtgggatgacacctcataaactacaccgaatgctcagctttggctttacagataaagtaataaagaagagccagtgtcccattggggtctttggtaatggtttcaagtcaggctccatgcggctaggaaaggacgcccttgtcttcaccaagaatgggggtactctcactgttggacttctatcacagacctatctggaatgtgtccaggcccaggcagttattgtaccaattgttccattcaaccagcaaaacaaaaaaatgattattaccgaggattcattgcccagcctagaagccatcttgaactattccattttcaaccgtgaaaatgacctgctggcccagtttgatgccatcccaggcaaaaaaggcactcgtgttctcatttggaacatccgcagaaataaaaatggaaaatctgagttggactttgatacagatcaatatgacatcctggtatcagactttgacacagaagaaaaaatgactggcggtgttacctctgagctaccagaaacagaatattctttaagggcattttgtggtattctatacatgaagccacgcatgaaaatttttctgcgtcaaaagaaggtgactacccagatgattgccaagagcctggccaatgtagaatatgatacatataaacctaccttcacaaataagcaggtgagaatcacctttgggttctcttgcaagaatagtaaccagtttggaataatgatgtatcataacaaccgactcataaaatcttttgagaaggtggggtgccaggtgaagccaactcgtggagaaggtgtaggagtaattggagtcattgagtgcaatttcctaaaacctgcctacaacaaacaagactttgagtataccaaggagtaccggctaacaataaatgcccttgcccagaagctcaatgcttactggaaggaaaaaacatctcaagataattttgagacctcaactgtagccaggccaataccgaaggttcctgaccagacatgggttcagtgtgatgagtgtcttaaatggagaaagcttcctgggaagattgatccatccatgttacctgcaagatggttttgttattataattcccatccaaagtacaggagatgctctgttccagaggaacaagaactcactgatgaagacctgtgcttgagcaaagctaagaaacaagaacaaactgttgaggagaagaagaagatgcctatggaaaatgagaaccaccaggtattcagtaatccaccaaagatccttactgttcaagaaatggctggattgaataacaagacaattggatatgagggaattcatagccctagtgtgcttccttctggtggagaagaaagcagatcaccatctcttcaacttaagcctctggattccagtgttttacagttttccagtaagtacaaatggatcctaggtgaagaaccggtggagaaacgaagaaggctccagaatgagatgacaacaccttctctagattattccatgcctgctccttacaggagggtagaagcacctgttgcctacccagaaggggagaacagccatgataaatcgagttctgagagaagtacaccaccataccttttcccagaatacccagaagcaagcaagaatacaggtcagaatagggaggtttcaattctgtatccaggggccaaagaccaacgccaggggtccctgcttcctgaagaattagaagatcagatgccaagattggtggcagaagaatctaacagaggtagcacaaccataaacaaagaagaagtcaacaagggaccttttgtagctgttgtgggtgttgccaaaggtgttagagattcaggagctcccattcagctgatcccttttaacagagaggagcttgctgagagacgaaaagcagttgaatcctggaacccagtgccttattctgtggcctctgctgcaatccctgctgcagccattggggagaaagcaagaggctatgaggagagcgaaggtcataatacaccaaagttgaagaaccagagagagctggaagaattgaagagaaccacagaaaaattggaacgtgttttggctgaaaggaatttgttccagcaaaaggtggaggagctggaacaggagaggaatcactggcagtctgaattcaagaaagtccaacatgaattggtgatctacagtacccaggaggcggaaggcttgtactggagcaagaaacacatgggttatcgccaagctgaattccagattctgaaagctgagctggaaagaaccaaagaggaaaagcaagagttaaaagagaaactgaaggaaacagagacacacctggaaatgctgcagaaggctcaggtctcctaccggaccccagagggagatgacctagaaagggctttggcaaagcttacgcggctacgtatccacgtcagctatctccttacttctgtcctccctcacttggagcttcgtgagatcgggtatgactcagaacaagtggatgggatcctgtacacggtgctggaggcaaatcacatactggattga

SEQ ID NO: 502 - DNA, 1731 bp, Homo Sapiens
atgatcgtctttggttgggccgtgttcttagcgagcagaagccttggccagggtctgttgttgactctcgaagagcacatagcccacttcctagggactggaggtgccgctactaccatgggtaattcctgtatctgccgagatgacagtggaacagatgacagtgttgacacccaacagcaacaggccgagaacagtgcagtacccactgctgacacaaggagccaaccacgggaccctgttcggccaccaaggaggggccgaggacctcatgagccaaggagaaagaaacaaaatgtggatgggctagtgttggacacactggcagtaatacggactcttgtagataatgatcaggaacctccctattcaatgataacattacacgaaatggcagaaacagatgaaggatggttggatgttgtccagtctttaattagagttattccactggaagatccactgggaccagctgttataacattgttactagatgaatgtccattgcccactaaagatgcactccagaaattgactgaaattctcaatttaaatggagaagtagcttgccaggactcaagccatcctgccaaacacaggaacacatctgcagtcctaggctgcttggccgagaaactagcaggtcctgcaagtataggtttacttagcccaggaatactggaatacttgctacagtgtctgaagttacagtcccaccccacagtcatgctttttgcacttatcgcactggaaaagtttgcacagacaagtgaaaataaattgactatttctgaatccagtattagtgaccggcttgtcacattggagtcctgggctaatgatcctgattatctgaaacgtcaagttggtttctgtgcccagtggagcttagacaatctctttttaaaagaaggtagacagctgacctatgagaaagtgaacttgagtagcattagggccatgctgaatagcaatgatgtcagcgagtacctgaagatctcacctcatggcttagaggctcgctgtgatgcctcctcttttgaaagtgtgcgttgcaccttttgtgtggatgccggggtatggtactatgaagtaacagtggtcacttctggcgtcatgcagattggctgggccactcgagacagcaaattcctcaatcatgaaggctacggcattggggatgatgaatactcctgtgcgtatgatggctgccggcagctgatttggtacaatgccagaagtaagcctcacatacacccatgctggaaagaaggagatacagtaggatttctgttagacttgaatgaaaagcaaatgatcttctttttaaatggcaaccagctgcctcctgaaaagcaagtcttttcatctactgtatctggattttttgctgcagctagtttcatgtcatatcaacaatgtgagttcaattttggagcaaaaccattcaaatacccaccatctatgaaatttagcacttttaatgactacgccttcctaacagctgaagaaaaaatcattttgccaaggcacaggcgtcttgctctgttgaagcaagtcagtatccgagaaaactgctgttccctttgttgtgatgaggtagcagacacacaattgaagccatgtggacacagtgacctgtgcatggattgtgccttgcagctggagacctgcccattgtgtcgtaaagaaatagtatctagaatcagacagatttctcatatttcatga

SEQ ID NO: 503 - DNA, 3072 bp, Homo Sapiens
atggatgccaattcaaaagacaagccccctgaaaccaaggagtctgcaatgaataatgctggaaatgcctctttcattttgggaactgggaagattgtgactcctcagaagcatgccgaattacctcctaatccttgcacaccagatacttttaaatcacctttgaacttttccacagtaaccgtagagcaattgggaattacacctgaaagctttgttaggaactctgcaggaaagtcatcatcctaccttaaaaaatgtagacgacgttctgcagtcggtgctcggggctctcctgaaacaaaccatctgattcgtttcattgctcggcagcaaaatataaagaatgctaggaaatctcctttggcacaagattctccttcccagggcagccctgcactgtatcgaaatgttaacactttaagagaacgaatatcagccttccagtcagcttttcactccataaaggaaaacgagaaaatgaccggctgtctggaattctcagaggcaggaaaagagtccgagatgacagacttgaccagaaaggaaggtctcagcgcttgccagcagtctgggttccctgcagtgttgtcctccaaacgtcggagaatatcctatcagagagactctgatgaaaatctgacggatgctgaaggaaaagtaattggtctccagatattcaatattgatacagacagagcatgtgcagttgaaacttctgtagatctttctgagatatcatctaaacttggttcaacacagtctggatttttagttgaagagtctcttcccctttcagagctcacagagacttcaaatgcactaaaggttgctgactgtgtagtgggcaaaggatcaagtgatgccgtttcgcctgacacgttcacagcagaagtgagctcagacgcagtccctgatgtcaggtcaccagctactccagcctgcaggagggaccttcccacccccaagacctttgtacttcgttctgtactgaagaaaccctctgttaagatgtgtctagagagcttacaggaacactgtaacaacctctatgatgatgatgggactcatccgagcttaatctcaaatctcccaaactgttgcaaagagaaagaagcagaagatgaagaaaattttgaagcacctgcctttctaaatatgaggaagaggaagagagttacttttggagaggacttaagcccggaagtgtttgatgaatctttgccagcaaatactccattgcgtaaaggaggaacacctgtttgtaaaaaagacttcagtggtctcagttccctgctgcttgagcagtcacctgttcctgagccattacctcaaccagattttgatgacaagggggagaatcttgaaaacatagaaccacttcaagtatcatttgccgttctcagttctcctaataaatcatcaatctctgagaccctttcaggcactgatacctttagttcttcaaataaccatgagaaaatatcctctcctaaagttggtagaataacaaggacttctaacagaagaaatcaattggtcagtgttgtagaagagagtgtttgcaacttattgaatacagaagttcagccttgtaaagaaaagaaaattaataggaggaagtctcaagaaacaaagtgtacaaagagagcacttcctaagaagagtcaggttttaaaaagttgcagaaagaagaaaggaaagggaaagaaaagtgttcagaaatctttatatggggaaagagacattgcttctaagaagcccctcctcagtcctattcccgagctgcctgaagtccctgagatgacaccttccattccgagcatccgaagactgggttcaggttatttcagttcaaatggcaaactggaagaagtgaagactcctaaaaatccagtgaaaagaaaggatcttttgcgtcatgacccagatttgcatatgcatcaaggctatgataaatatgatgtctctgaattctgctcttatataaaaagttcctcatcgcttggcaatgctacttctgatgaagatccaaatacaaatataatgaacattaatgaaaataaaaatattccaaaagcaaaaaataagtcagaaagtgaaaatgaaccaaaagctggaactgacagtcctgtttcttgtgcttctgtaactgaagaacgtgtggcatcagatagtcccaaacctgctctgaccctgcagcagggtcaagaattttctgctggtggtcaaaatgcagaaaacctttgtcagttctttaaaatttcaccagatttaaacataaagtgtgaaagaaaggatgacttcttaggagctgcagaaggaaaactgcaatgcaatcgtttaatgcctaattcacaaaaagactgtcattgtttaggagatgtcttaattgaaaatacgaaagaatctaaaagccagagtgaggatttgggaagaaaacccatggaaagtagcagtgttgtgagttgcagagacaggaaagatagaagacgttccatgtgttattctgatggtcgaagtttacatttggaaaaaaatggaaatcacacaccatcctccagtgtgggcagctctgtagaaattagtttagaaaattctgaactgtttaaagatttgtctgatgccattgagcaaacctttcagaggagaaatagtgaaaccaaagtgcgacgtagcacgaggctacagaaggatttagaaaacgaaggtcttgtatggatttcacttccacttccttccacttcccaaaaagccaaaagaagaacaatatgtacatttgacagcagtggatttgaaagtatgtctcccataaaagaaactgtgtcctccagacaaaaaccgcagatggcacctcccgtctcagatccagaaaacagccagggccctgctgctggttcttccgatgaacctggtaagaggaggaagagcttttgtatatctacacttgcaaatactaaagccacttcccagttcaaaggctaccggagaagatcctctcttaatgggaagggagagagctctctgactgccttggaaaggattgaacataatggagaaagaaagcagtaa

SEQ ID NO: 504 - DNA, 393 bp, Homo Sapiens
atggatgcagggtcagtgcgcccctctggagctgacagcccagcctgtgcccaggacctttctgccttcccttcccgccgtgtcctgagagctcaccgtgccctctgtggccccgaccccaaggcttgtttgtttcttggcctgctcctccctgccctgcgccatacggaacacacaccttgggggagaagcactgctgcctatgcactccatttacagggttatagagtggaaagtcccacaatctttttcttctctattttcagaaaaacgttgacctcttggcgagaatgcaaagaagggaacgcttgcttatacgctgttggtgaactgtcacccctacaactcagcttgcaaccagccctggccaccagtttccccacactgagctga

SEQ ID NO: 505 - DNA, 363 bp, Homo Sapiens
atgtattcatttcctaccaccgtagtggaagagagattttccctatctttacaactgatagcatttccaacagtaagctgtgagattctgcttgaaatcacctctcaaacaaataaaaaacagacctgggagacatgctacactcattctgctgaggaaataggcatcatagctgggaaacggattcacaagacccaggctgttccctacatatgtttcctcctccgacatcagttcatcagtcaatcaagccatgtgagagtggaggccttgtattccctattattcttgggcactctactccaagtaggaaaaggccaggaggtcctgttaaaggatgcactcagagcccgggctccctaa

SEQ ID NO: 506 - DNA, 2283 bp, Homo Sapiens
atgctgaccttccttccctccccccaggagctgttcacccgctcactggctgagagcgagctccgtagtgccccgtatgagttccccgaggagagccccattgaacagctggaggagcggcggcagcggctggagcggcagatcagccaggatgtcaagctggagccagacatcctgcttcgggccaagcaagatttcctgaagacggacagtgactcggacctacagctctacaaggaacagggtgaggggcagggtgaccggagcctgcgggagcgtgatgtgctggaacgggagtttcagcgggtcaccatctctggggaggagaagtgtggggtgccgttcacagacctgctggatgcagccaagagtgtggtgcgggcgctcttcatccgggagaagtacatggccctgtccctgcagagcttctgccccaccacccgccgctacctgcagcagctggctgaaaagcctctggagacccggacctatgaacagggccccgacacccctgtgtctgctgatgccccggtgcacccccctgcgctggagcagcacccgtatgagcactgtgagccaagcaccatgcctggggacctgggcttgggtctgcgcatggtgcggggtgtggtgcacgtctacacccgcagggaacccgacgagcattgctcagaggtggagctgccataccctgacctgcaggaatttgtggctgacgtcaatgtgctgatggccctgattatcaatggccccataaagtcattctgctaccgccggctgcagtacctgagctccaagttccagatgcatgtgctactcaatgagatgaaggagctggccgcccagaagaaagtgccacaccgagatttctacaacatccgcaaggtggacacccacatccatgcctcgtcctgcatgaaccagaagcatctgctgcgcttcatcaagcgggcaatgaagcggcacctggaggagatcgtgcacgtggagcagggccgtgaacagacgctgcgggaggtctttgagagcatgaatctcacggcctacgacctgagtgtggacacgctggatgtgcatgcggacaggaacactttccatcgctttgacaagtttaatgccaaatacaaccctattggggagtccgtcctccgagagatcttcatcaagacggacaacagggtatctgggaagtactttgctcacatcatcaaggaggtgatgtcagacctggaggagagcaaataccagaatgcagagctgcggctctccatttacgggcgctcgagggatgagtgggacaagctggcgcgctgggccgtcatgcaccgcgtgcactcccccaacgtgcgctggctggtgcaggtgccccgcctctttgatgtgtaccgtaccaagggccagctggccaacttccaggagatgctggagaacatcttcctgccactgttcgaggccactgtgcaccctgccagccacccggaactgcatctcttcttagagcacgtggatggttttgacagcgtggatgatgagtccaagcctgaaaaccatgtcttcaacctggagagccccctgcctgaggcgtgggtggaggaggacaacccaccctatgcctactacctgtactacacctttgccaacatggccatgttgaaccacctgcgcaggcagaggggcttccacacgtttgtgctgaggccacactgtggggaggctgggcccatccaccacctggtgtcagccttcatgctggctgagaacatttcccacgggctccttctgcgcaaggcccccgtcctgcagtacctgtactacctggcccagatcggcatcgccatgtctccgctcagcaacaacagcctcttcctcagctatcaccggaatccgctaccggagtacctgtcccgcggcctcatggtctccctgtccactgatgatcccttgcagttccacttcaccaaggagccgctgatggaggagtacagcatcgccacccaggtgtggaagctcagctcctgcgatatgtgtgagctggcccgcaacagcgtgctcatgagcggcttctcgcacaaggtaaagagccactggctgggacccaactataccaaggaaggccctgaggggaatgacatccgccggaccaatgtgccagacatccgcgtgggctaccgctacgagaccctgtgccaggagctggcgctcatcacgcaggcagtccagagtgagatgctggagaccattccagaggaggcgggtatcaccatgagcccagggcctcaatga

SEQ ID NO: 507 - DNA, 426 bp, Homo Sapiens
atgacgaagcaacatgaattagggggcctcttggccttggtccaaaattgtcaatcagagatgaacataaaggactccagagcagtgggactgtctgtcaaaagactctgtatatcttttgtggatgagttttgtgagagaacagagagaccattgtacctggcacaagggctcttcatgaaaagggagacttactgggaggtgcaagacagtggcatttctcctctcctcttgctgctcagcacagccctggattgcagccccgaggctgagaccagacaaagcccgggaggcagaaagatgctccaagaaccaacactatcaatgtctttgcaaatcctcacaggattcctgtgggtccagctttggaactgggaaacctttcttcggatccgcactcattccactgatgccagctgcccctga

SEQ ID NO: 508 - DNA, 1863 bp, Homo Sapiens
atgtcacggccaggccacggtgggctgatgcctgtgaatggtctgggcttcccaccgcagaacgtggcccgggtggtggtgtgggagtggctgaatgagcacagccgctggcggccctacacggccaccgtgtgccaccacattgagaacgtgctgaaggaggacgctcgcggttccgtggtcctggggcaggtggacgcccagcttgtgccctacatcatcgacctgcagtccatgcaccagtttcgccaggacacaggcaccatgcggcccgtgcggcgcaacttctacgacccgtcgtcggcgccgggcaagggcatcgtgtgggagtgggagaacgacggcggcgcatggacggcctacgatatggacatctgcatcaccatccagaacgcctacgagaagcagcacccgtggctcgacctctcatcgctaggcttctgctacctcatctacttcaacagcatgtcgcagatgaaccgccagacgcgccggcgccgccgcctgcgccgccgcctggacctcgcctacccgctcaccgtgggctccatccctaagtcgcagtcgtggcccgtgggcgccagctcgggccagccctgctcctgccagcagtgcctgctggtcaacagcacgcgcgccgcctccaacgccatcctggcctcgcagcgccgcaaggcgccccccgcgcccccgctgccgccgccgccgccacctggagggcctccaggcgcgcttgccgtgcgccccagcgccaccttcacaggcgccgcgctctgggcagcgcccgccgccggccccgccgagcccgcgccgcctcccggggcgcccccacggagcccgggcgcccccggcggagcgcgcaccccggggcagaacaacctcaaccggcccgggccccagcgcaccaccagcgtgagcgcgcgcgcctccatcccgccgggggtccccgcactcccggtgaagaacttgaatggtactgggccggtccatccggccctggcagggatgaccgggatactgctgtgcgcggccgggctgcccgtgtgcctgacgcgggcccccaagcccatcctgcacccgccgcccgtgagcaagagcgacgtgaagcccgtgcctggcgtgcccggggtgtgccgcaagaccaagaagaagcaccttaaaaagagtaagaatcccgaggatgtggttcgaagatacatgcagaaggtgaaaaacccacctgatgaggactgcaccatctgcatggagcgactggtcacagcatcaggctacgagggcgtgcttcggcacaagggcgtgcggcctgagctcgtgggccgcctgggccgctgtggccacatgtaccacctgctgtgcctcgtggccatgtactccaatggcaacaaggatggcagcctgcagtgccccacctgcaaggccatctacggggagaagacgggtacgcagccgcctgggaagatggagttccacctcatcccccactcgctgcccggcttccctgatacccagaccatccgcatcgtctatgacatccccacaggcatccagggccctgagcaccccaaccccgggaagaagttcaccgcaagaggattccctcgccactgctatctacccaacaacgagaaaggccggaaggtgctgcggctgctcatcacggcctgggagagaagactcatcttcactatcggcacgtccaacaccacgggcgagtcggacaccgtggtgtggaacgagatccaccacaagaccgagtttggatccaacctcacgggccacggctacccggacgctagctacctagacaacgtgctggctgagctcacagcccagggcgtatccgaggctgcagccaaggcttga

SEQ ID NO: 509 - DNA, 1443 bp, Homo Sapiens
atgcagatcccgcgcgccgctcttctcccgctgctgctgctgctgctggcggcgcccgcctcggcgcagctgtcccgggccggccgctcggcgcctttggccgccgggtgcccagaccgctgcgagccggcgcgctgcccgccgcagccggagcactgcgagggcggccgggcccgggacgcgtgcggctgctgcgaggtgtgcggcgcgcccgagggcgccgcgtgcggcctgcaggagggcccgtgcggcgaggggctgcagtgcgtggtgcccttcggggtgccagcctcggccacggtgcggcggcgcgcgcaggccggcctctgtgtgtgcgccagcagcgagccggtgtgcggcagcgacgccaacacctacgccaacctgtgccagctgcgcgccgccagccgccgctccgagaggctgcaccggccgccggtcatcgtcctgcagcgcggagcctgcggccaagggcaggaagatcccaacagtttgcgccataaatataactttatcgcggacgtggtggagaagatcgcccctgccgtggttcatatcgaattgtttcgcaagcttccgttttctaaacgagaggtgccggtggctagtgggtctgggtttattgtgtcggaagatggactgatcgtgacaaatgcccacgtggtgaccaacaagcaccgggtcaaagttgagctgaagaacggtgccacttacgaagccaaaatcaaggatgtggatgagaaagcagacatcgcactcatcaaaattgaccaccagggcaagctgcctgtcctgctgcttggccgctcctcagagctgcggccgggagagttcgtggtcgccatcggaagcccgttttcccttcaaaacacagtcaccaccgggatcgtgagcaccacccagcgaggcggcaaagagctggggctccgcaactcagacatggactacatccagaccgacgccatcatcaactatggaaactcgggaggcccgttagtaaacctggacggtgaagtgattggaattaacactttgaaagtgacagctggaatctcctttgcaatcccatctgataagattaaaaagttcctcacggagtcccatgaccgacaggccaaaggaaaagccatcaccaagaagaagtatattggtatccgaatgatgtcactcacgtccagcaaagccaaagagctgaaggaccggcaccgggacttcccagacgtgatctcaggagcgtatataattgaagtaattcctgataccccagcagaagctggtggtctcaaggaaaacgacgtcataatcagcatcaatggacagtccgtggtctccgccaatgatgtcagcgacgtcattaaaagggaaagcaccctgaacatggtggtccgcaggggtaatgaagatatcatgatcacagtgattcccgaagaaattgacccatag

SEQ ID NO: 510 - DNA, 1506 bp, Homo Sapiens
atggctgcagctagcgtgaccccccctggctccctggagttgctacagcccggcttctccaagaccctcctggggaccaagctggaagccaagtacctgtgctccgcctgcagaaacgtcctccgcaggcccttccaggcgcagtgtggccaccggtactgctccttctgcctggccagcatcctcagctctgggcctcagaactgtgctgcctgtgttcacgagggcatatatgaagaaggcatttctattttagaaagcagttcggccttcccagataatgctgcccgcagggaggtggagagcctgccggccgtctgtcccagtgatggatgcacctggaaggggaccctgaaagaatacgagagctgccacgaaggccgctgcccgctcatgctgaccgaatgtcccgcgtgcaaaggcctggtccgccttggtgaaaaggagcgccacctggagcacgagtgcccggagagaagcctgagctgccggcattgccgggcaccctgctgcggagcagacgtgaaggcgcaccacgaggtctgccccaagttccccttaacttgtgacggctgcggcaagaagaagatcccccgggagaagtttcaggaccacgtcaagacttgtggcaagtgtcgagtcccttgcagattccacgccatcggctgcctcgagacggtagagggtgagaaacagcaggagcacgaggtgcagtggctgcgggagcacctggccatgctactgagctcggtgctggaggcaaagcccctcttgggagaccagagccacgcggggtcagagctcctgcagaggtgcgagagcctggagaagaagacggccacttttgagaacattgtctgcgtcctgaaccgggaggtggagagggtggccatgactgccgaggcctgcagccggcagcaccggctggaccaagacaagattgaagccctgagtagcaaggtgcagcagctggagaggagcattggcctcaaggacctggcgatggctgacttggagcagaaggtcttggagatggaggcatccacctacgatggggtcttcatctggaagatctcagacttcgccaggaagcgccaggaagctgtggctggccgcatacccgccatcttctccccagccttctacaccagcaggtacggctacaagatgtgtctgcgtatctacctgaacggcgacggcaccgggcgaggaacacacctgtccctcttctttgtggtgatgaagggcccgaatgacgccctgctgcggtggcccttcaaccagaaggtgaccttaatgctgctcgaccagaataaccgggagcacgtgattgacgccttcaggcccgacgtgacttcatcctcttttcagaggccagtcaacgacatgaacatcgcaagcggctgccccctcttctgccccgtctccaagatggaggcaaagaattcctacgtgcgggacgatgccatcttcatcaaggccattgtggacctgacagggctctaa

SEQ ID NO: 511 - DNA, 798 bp, Homo Sapiens
atgaaggttcttttactgaaggatgcgaaggaagatgactgtggccaggatccgtatatcagggaattaggattatatggacttgaagccactttgatccctgttttatcgtttgagtttttgtctcttcccagtttctctgagaagctttctcatcctgaagattacgggggactcatttttaccagccccagagcagtggaagcagcagagttatgtttggagcaaaacaataaaactgaagtctgggaaaggtctctgaaagaaaaatggaatgccaagtcagtgtatgtggttggaaatgctactgcttctctagtgagtaaaattggcctggatacagaaggagaaacctgtggaaatgcagaaaagcttgcagaatatatttgttccagggagtcctcagcactgcctcttctatttccctgtggaaacctcaaaagagaaatcctgccaaaagcgctcaaggacaaagggattgccatggaaagcataactgtgtatcagacagttgcacacccaggaatccaagggaacctgaacagctactattcccagcagggggttccagccagcatcacattttttagtccctctggcctcacatacagtctcaagcacattcaggagttatctggtgacaatatcgatcaaattaagtttgcagccatcggccccactacggctcgcgcgctggccgcccagggccttcctgtaagctgcactgcagagagccccacgccacaagccctggccactggcatcaggaaggctctccagccccatggctgctgctga

SEQ ID NO: 512 - DNA, 2337 bp, Homo Sapiens
atgaacaaggtagatcagaagttccaggggtcagtatcatttaaagatgtgactgtgggcttcacccaggaggagtggcagcacctggaccctagtcagagggctctgtatagagatgtgatgctggagaactacagcaaccttgtctcagtggggtattgtgctcacaaaccagaggtgatcttcaggctggaacaaggagaagaaccatggagactggaggaagaattcccaagccagagctttccagaagtctggacagctgatcacctgaaagagaggagccaagaaaatcaatctaaacatttgtgggaagttgtattcatcaataatgaaatgctgactaaggaacaaggtaatgtaataggaataccatttaacatggacgtaagttcttttccttccagaaaaatgttctgtcagtatgactcacgtggaatgagtttcaacactgtttcagaattggttatcagtaagataaactatttaggaaaaaagtctgacgaatttaatgcatgtgggaaattgttactcaatattaagcatgatgaaactcatactcgagagaaaaatgaagttttgaaaaataggaacactctgagtcatcgtgagaacactttgcagcatgagaagattcaaactttagaccacaattttgaatacagtatatgtcaggaaaccctccttgaaaaggcagtattcaatacacggaagagagagaatgcagaagagaataactgtgactataatgaatttgggagaactttctgtgatagttcatccctcttgttccatcagatacctccatcaaaggacagtcactatgaatttagtgattgtgagaagttcttatgtgtgaagtccaccctttctaaacatgatggggtacctgtgaaacactatgattgtggtgaaagtgggaataatttcaggaggaaattgtgtctgtcacagcttcagaaaggtgataaaggagagaaacactttgaatgtaatgaatgtgggaaagctttctgggagaagtcacatctcactcgacatcagagggtgcacacaggagagaaacactttcaatgtaatcaatgtggaaaaactttctgggagaagtcaaacctcactaaacatcagagatcacacacaggggagaaaccttttgaatgcaatgaatgtgggaaagcctttagccataagtcagccctcacattacaccagagaacacatacaggggagaaaccctatcagtgtaatgcatgtgggaaaactttttaccagaaatctgacctcactaaacatcagagaacacacacagggcagaaaccctatgaatgttatgaatgtggaaaatccttctgtatgaattcacaccttacagtacaccagagaactcacacaggtgagaaaccttttgaatgtcttgagtgtgggaaatccttttgtcaaaagtcacatcttacacagcatcagagaactcacataggagataaaccttatgaatgtaatgcatgtgggaaaactttctaccacaagtcagtactcaccaggcatcagataattcatacagggttgaaaccttatgaatgttatgaatgtgggaaaaccttctgcttgaagtcagacctcacaatacatcagagaacgcacacaggggagaaaccctttgcatgtcctgaatgtgggaaattctttagccataagtcaaccctctctcaacattatagaacacacacgggggagaaaccctatgaatgtcatgaatgtggaaaaatcttttacaataaatcatacctaacaaaacataatagaacacatacaggggagaaaccctatgaatgtaatgaatgtggaaaaaccttctgccagaagtcacaactcactcagcatcagagaattcacataggggagaaaccctatgaatgtaatgagtgtggaaaagctttctgccataagtcagctctaattgtacatcagagaacccatacacaagaaaagccttataaatgtaacgaatgtggaaaatctttctgtgtgaagtcaggacttattttacatgagagaaagcacacgggggagaaaccctatgaatgcaatgaatgtgggaaatccttcagtcacaaatcatcactcacagtacatcacagggctcacacaggagagaaatcttgtcagtgtaatgaatgtggaaaaatcttttaccgtaaatcagaccttgctaaacatcagagatcacatacaggggaaaagccctatgaatgtaacacatgcaggaaaaccttctctcaaaagtcaaatctcattgtacatcagagaacacacataggagaaaaaccttatgaatga

SEQ ID NO: 513 - DNA, 1680 bp, Homo Sapiens
atggcccccacgctgcaacaggcgtaccggaggcgctggtggatggcctgcacggctgtgctggagaacctcttcttctctgctgtactcctgggctggggctccctgttgatcattctgaagaacgagggcttctattccagcacgtgcccagctgagagcagcaccaacaccacccaggatgagcagcgcaggtggccaggctgtgaccagcaggacgagatgctcaacctgggcttcaccattggttccttcgtgctcagcgccaccaccctgccactggggatcctcatggaccgctttggcccccgacccgtgcggctggttggcagtgcctgcttcactgcgtcctgcaccctcatggccctggcctcccgggacgtggaagctctgtctccgttgatattcctggcgctgtccctgaatggctttggtggcatctgcctaacgttcacttcactcacgctgcccaacatgtttgggaacctgcgctccacgttaatggccctcatgattggctcttacgcctcttctgccattacgttcccaggaatcaagctgatctacgatgccggtgtggccttcgtggtcatcatgttcacctggtctggcctggcctgccttatctttctgaactgcaccctcaactggcccatcgaagcctttcctgcccctgaggaagtcaattacacgaagaagatcaagctgagtgggctggccctggaccacaaggtgacaggtgacctcttctacacccatgtgaccaccatgggccagaggctcagccagaaggcccccagcctggaggacggttcggatgccttcatgtcaccccaggatgttcggggcacctcagaaaaccttcctgagaggtctgtccccttacgcaagagcctctgctcccccactttcctgtggagcctcctcaccatgggcatgacccagctgcggatcatcttctacatggctgctgtgaacaagatgctggagtaccttgtgactggtggccaggagcatgagacaaatgaacagcaacaaaaggtggcagagacagttgggttctactcctccgtcttcggggccatgcagctgttgtgccttctcacctgccccctcattggctacatcatggactggcggatcaaggactgcgtggacgccccaactcagggcactgtcctcggagatgccagggacggggttgctaccaaatccatcagaccacgctactgcaagatccaaaagctcaccaatgccatcagtgccttcaccctgaccaacctgctgcttgtgggttttggcatcacctgtctcatcaacaacttacacctccagtttgtgacctttgtcctgcacaccattgttcgaggtttcttccactcagcctgtgggagtctctatgctgcagtgttcccatccaaccactttgggacgctgacaggcctgcagtccctcatcagtgctgtgttcgccttgcttcagcagccacttttcatggcgatggtgggacccctgaaaggagagcccttctgggtgaatctgggcctcctgctattctcactcctgggattcctgttgccttcctacctcttctattaccgtgcccggctccagcaggagtacgccgccaatgggatgggcccactgaaggtgcttagcggctctgaggtgaccgcatag

SEQ ID NO: 514 - DNA, 342 bp, Homo Sapiens
atggccgacgtggaagacggagaggaaacctgcgccctggcctctcactccgggagctcaggctccaagtcgggaggcgacaagatgttctccctcaagaagtggaacgcggtggccatgtggagctgggacgtggagtgcgatacgtgcgccatctgcagggtccaggtgatggatgcctgtcttagatgtcaagctgaaaacaaacaagaggactgtgttgtggtctggggagaatgtaatcattccttccacaactgctgcatgtccctgtgggtgaaacagaacaatcgctgccctctctgccagcaggactgggtggtccaaagaatcggcaaatga

SEQ ID NO: 515 - DNA, 1146 bp, Homo Sapiens
atggagcgcgggatgcacctcggtgcagcggccgccggcgaggacgacctcttcctgcacaagagcctgagcgcctccacctccaagcgcttggaagcggctttccgctccacgcccccgggcatggacctgtccctggcgccgccgcctcgggaacgcccggcgtcctcctcctcgtcgcccctgggctgcttcgagccggctgaccccgagggggcagggctgctgttgccgccgcctggaggaggcggcggcggcagcgcgggaagtggcggcggcggcggcggcggggtgggtgtccccgggctgctagtaggttcagccggcgttgggggcgaccctagcctaagcagcctgccggccggggccgccctttgcctcaagtacggcgaaagcgcgagccggggctcggtggccgagagcagcggcggcgagcagagccccgacgacgacagcgacggtcgctgcgagctcgtgctgcgggccggagtagccgacccgcgggcctccccgggagcgggaggtggtggcgcgaaggcagccgagggctgctccaatgcccacctccacggcggcgccagcgtccccccggggggcctgggcggcggcggcggcgggggtagcagcagcggtagcagtggcggcggtggcggtagcggtagcggcagcggcggcagcagcagcagcagcagcagcagcagcaagaaatccaaagagcaaaaggcgctgcggcttaacatcaatgcccgagagcgccggcggatgcacgacctgaacgacgcgctggacgagctgcgcgcggtgatcccctacgcgcacagcccctcggtgcgaaagctctccaagatcgccacgctgctgctcgccaagaactacatcctcatgcaggcgcaggccctggaggagatgcggcgcctagtcgcctacctcaaccagggccaggccatctcggctgcctccctgcccagctcggcggctgcagcggcagcagctgctgccctgcacccggcgctcggcgcctacgagcaggcagccggctacccgttcagcgccggactgcccccggctgcctcctgcccggagaagtgcgccctgtttaacagcgtctcctccagcctctgcaaacagtgcacggagaagccttaa

SEQ ID NO: 516 - DNA, 1398 bp, Homo Sapiens
atgcggagagccgccgggatggaggacttctccgcggaggaagaggagtcctggtacgaccagcaggacctggagcaggacttgcacctagctgcggagctggggaagactctgctggagaggaacaaggagctggaggggtccctgcagcagatgtactccaccaatgaggaacaggtgcaggagatcgagtacctaaccaagcagctggacacgctgcggcacgtgaacgagcagcacgccaaagtctatgagcagctggacctgacagcccgggacctggagctgaccaaccacaggctggtgctggagagtaaggctgcccagcagaagatccatgggctgacggagaccattgagcgcctccaggctcaggtggaggagctgcaggcccaggtggagcaactgagaggcctggaacagctgcgagtgctccgggagaagcgggaacgcaggcgtaccatccacaccttcccctgcctcaaggagctgtgcaccagcccccggtgcaaggatgctttccgcctacacagttcctccctggagctgggcccgcggcccctggagcaggagaacgagcggctgcagaccctggtgggggcgctgcgctcccaggtgagccaggagcggcagcgcaaggagcgggcggagcgcgagtacaccgcggtgctgcaggagtactcggagctggagcgccagctgtgcgagatggaggcctgtcgcctgcgtgtgcaggagctggaggccgagctgctggagctgcagcagatgaagcaggccaagacctacctactgggtccggacgaccacctggccgaggccctgctcgcacccctcacgcaggcccctgaggccgacgatccccagcccggccgcggggacgacttgggcgcccaggacggggtctcctcaccggcagcctctccaggccacgtggtgcgcaagagctgcagcgacactgcgctcaacgccatcgtggccaaagacccagccagccggcacgcgggcaacctcacactgcacgccaacagcgtgcgcaagcggggcatgtccatcctgcgggaggtggacgagcagtaccacgcgctgctggagaagtacgaggagctgctgagcaagtgccggcagcacggggccggagtgcggcacgccggcgtgcagacctcgcgccccatctcccgggacagctcgtggagggacctgcgcgggggtgaggagggccagggtgaggtcaaggcaggagagaagagcctgagccagcacgtggaggccgtggacaagcggctggaacagagccagcccgagtacaaggcgctcttcaaagagatcttctccaggatccagaagaccaaggctgacatcaacgccaccaaagtcaagacgcacagcagcaagtga

SEQ ID NO: 517 - DNA, 762 bp, Homo Sapiens
atggcggcggcttttcggaaggcggctaagtcccggcagcgggaacacagagagcgaagccagcctggctttcgaaaacatctgggcctgctggagaaaaagaaagattacaaacttcgtgcagatgactaccgtaaaaaacaagaatacctcaaagctcttcggaagaaggctcttgaaaaaaatccagatgaattctactacaaaatgactcgggttaaactccaggatggagtacatattattaaggagactaaggaagaagtaaccccagaacaactaaagctgatgagaactcaggacgtcaaatatatagaaatgaagagggttgcagaagctaagaaaatcgaaagactaaaatcagagctccatctgctggatttccaggggaagcaacagaacaagcatgtgttcttttttgacaccaaaaaggaagttgaacagtttgatgtcgcaactcacctgcaaacagccccggagctagtcgacagagtctttaataggcccaggatagagaccttgcagaaagaaaaagtgaaaggagttaccaatcagactggacttaagcgaatagctaaagaaaggcaaaagcagtataactgcctgacacagcggattgaacgagagaagaaattgttcgttattgctcagaaaattcaaacacgcaaagatcttatggataaaactcagaaagtgaaggtgaagaaagaaacggtgaactccccagctatttataaatttcagagtcgtcgaaaacgttga

SEQ ID NO: 518 - DNA, 855 bp, Homo Sapiens
atgaagaccagcgcagagctccacgagcaggaaaagcccccaagcagccccagggcgactggaccgggccgcttaggccacgcccggggaagagggcctgacgcgctgcggggcggggccgcggggccgggtcgcgcgagcagcggagcaccaagggaacggaaaatggcgcctcacgacccgggtagtcttacgaccctggtgccctgggctgccgccctgctcctcgctctgggcgtggaaagggctctggcgctacccgagatatgcacccaatgtccagggagcgtgcaaaatttgtcaaaagtggccttttattgtaaaacgacacgagagctaatgctgcatgcccgttgctgcctgaatcagaagggcaccatcttggggctggatctccagaactgttctctggaggaccctggtccaaactttcatcaggcacataccactgtcatcatagacctgcaagcaaaccccctcaaaggtgacttggccaacaccttccgtggctttactcagctccagactctgatactgccacaacatgtcaactgtcctggaggaattaatgcctggaatactatcacctcttatatagacaaccaaatctgtcaagggcaaaagaacctttgcaataacactggggacccagaaatgtgtcctgagaatggatcttgtgtacctgatggtccaggtcttttgcagtgtgtttgtgctgatggtttccatggatacaagtgtatgcgccagggctcgttctcactgcttatgttcttcgggattctgggagccaccactctatccgtctccattctgctttgggcgacccagcgccgaaaagccaagacttcatga

SEQ ID NO: 519 - DNA, 1086 bp, Homo Sapiens
atggcccagcccggggacccgcggcgcctctgcaggctggtgcaggagggccggctgcgcgccctgaaggaggagctgcaggcggccgggggctgcccggggccggccggggataccctcctgcactgcgccgcgcgccacgggcatcgggacgtgctggcctatctggccgaggcctggggcatggacatcgaggccaccaaccgagactacaagcggcctctgcacgaggcggcctccatgggccaccgagactgcgtgcgctacctgctgggccggggggcagcggtcgactgcctgaagaaggccgactggactcctctgatgatggcctgcacaaggaagaacctgggggtgatccaggagctggtggaacatggcgccaatccactcctgaagaacaaagatggctggaacagtttccacattgccagtcgagaaggcgaccctctgatcctccagtacctgctcactgtttgcccaggtgcctggaagacagagagcaaaattagaaggactcctctgcatactgcagcaatgcatggccatttggaggcagtcaaggtgcttcttaagaggtgccaatatgaaccagactacagagacaactgtggcgtcaccgccttgatggacgcaatccagtgtgggcacatcgacgtcgctaggctgctcctcgatgaacatggggcttgcctttcagcagaagacagcctgggtgcccaggctctgcacagggcagctgtcacagggcaggacgaagccatccgattcttggtctctgaacttggcgtcgatgtagatgtgagagccacatcaacccacctcacagcacttcattatgcagctaaggaaggacatacaagtacaattcagactctcttatccttgggagctgacatcaattctaaagatgaaaaaaatcgatcagccctgcatctggcctgtgcaggtcagcacttggcctgtgccaagtttctcctgcagtcgggactgaaggattctgaagacatcacgggcaccctggctcagcagctcccaaggagagcagatgtccttcagggctctggccatagcgcaatgacataa

SEQ ID NO: 520 - DNA, 1065 bp, Homo Sapiens
atgtgtgggcgaacatcctgtcacttacctagagatgttctcacgagagcttgcgcctaccaggatcggcggggccagcagcggctcccggagtggagggaccctgataagtactgcccctcttacaacaagagtcctcaatccaacagcccagtgcttctgtctcgactgcactttgagaaggatgcagactcatctgagcgtatcattgctcccatgcgctggggcttggtcccttcttggttcaaagaaagtgatccttccaagctgcagttcaatactaccaactgtcgtagtgataccgtaatggagaaacggtcatttaaggtgcctctgggaaagggaagacgctgtgtcgttttagcagatggattctatgagtggcagcgatgtcagggaacaaaccagaggcagccatacttcatctattttcctcaaatcaagacagagaagtcaggtagcattggtgctgcagatagtcctgagaactgggagaaagtctgggacaactggaggctgctgacaatggccgggatctttgactgctgggagcccccagagggaggagatgtcctgtattcctataccatcatcacagtggattcctgcaaaggcttgagtgacatccaccacaggatgcctgccatattagatggagaggaggcagtttctaaatggcttgactttggtgaagtctcaactcaggaagctctgaaattaatccacccaacagagaacatcaccttccatgcagtctcttctgtggtgaacaactcgcgaaacaacactcctgagtgtctggctcctgtcgacttggtggtcaaaaaggagctcagggcaagtggcagtagccagaggatgttgcagtggttggccacaaagtcacccaaaaaggaagactcaaaaacacctcaaaaggaagagtcagatgttccccagtggtccagtcagttcctgcagaagagtccactccccaccaagagaggcactgcaggactcctagagcaatggctgaagcgggagaaggaggaggaacctgtggccaagcgtccttacagccagtga

SEQ ID NO: 521 - DNA, 1083 bp, Homo Sapiens
atgagccaggggcgtggaaaatatgacttctatattggtctgggattggctatgagctccagcattttcattggaggaagtttcattttgaaaaaaaagggcctccttcgacttgccaggaaaggctctatgagagcaggtcaaggtggccatgcatatcttaaggaatggttgtggtgggctggactgctgtcaatgggagctggtgaggtggccaacttcgctgcgtatgcgtttgcaccagccactctagtgactccactaggagctctcagcgtgctagtaagtgccattctttcttcatactttctcaatgaaagacttaatcttcatgggaaaattgggtgtttgctaagtattctaggatctacagttatggtcattcatgctccaaaggaagaggagattgagactttaaatgaaatgtctcacaagctaggtgatccaggttttgtggtctttgcaacccttgtggtcattgtggccttgatattaatcttcgtggtgggtcctcgccatggacagacaaacattcttgtgtacataacaatctgctctgtaatcggcgcgttttcagtctcctgtgtgaagggcctgggcattgctatcaaggagctgtttgcagggaagcctgtgctgcggcatcccctggcttggattctgctgctgagcctcatcgtctgtgtgagcacacagattaattacctaaatagggccctggatatattcaacacttccattgtgactccaatatattatgtattctttacaacatcagttttaacttgttcagctattctttttaaggagtggcaagatatgcctgttgacgatgtcattggtactttgagtggcttctttacaatcattgtggggatattcttgttgcatgcctttaaagacgtcagctttagtctagcaagtctgcctgtgtcttttcgaaaagacgagaaagcaatgaatggcaatctctctaatatgtatgaagttcttaataataatgaagaaagcttaacctgtggaatcgaacaacacactggtgaaaatgtctcccgaagaaatggaaatctgacagctttttaa

SEQ ID NO: 522 - DNA, 2268 bp, Homo Sapiens
atgactgaatctgcctctagcacaagtggtcaagagtttgatgtgttcagtgttatggactggaaagatggagtgggcacgttaccaggaagtgacttaaagtttcgggtaaatgagtttggagccctggaagttattacagatgagaatgagatggaaaatgttaaaaaagcaactgctaccaccacttggatggtaccaactgctcaagaagtcttttcagagaagactgggatgcctttcaggttgaaggatccagtgaaagtagaagggcttcagttctgtgagaactgttgtcagtatggcaacgtagatgagtgtctttctggaggaaactattgcagccagaattgtgctcggcacatcaaagataaagatcagaaggaagaaagggacgtagaagaagacaatgaggaagaagatcctaagtgtagtcggaagaaaaaaccaaaattatctctgaaagctgacaccaaggaggatggagaagagagagatgatgaaatggagaacaaacaagatgtaagaatcctgaggggttcgcagagagcacggaggaaaagacgaggggattcggctgtactaaagcagggtttgcctcctaaaggaaagaaagcgtggtgctgggcatcctacctggaagaggagaaagcggtggcagtgccggcgaagctgttcaaggagcatcaatcctttccatataacaaaaatggattcaaagttggcatgaaattagaaggcgtggatcccgagcatcagtctgtgtactgtgtcctcaccgtcgcggaggtttgtggataccggataaagcttcactttgatgggtattctgattgctatgacttctgggtgaatgcagacgctctggatatccacccagttgggtggtgtgagaaaaccggccacaaactccatcctccaaaagggtataaagaagaagaattcaattggcagacctatcttaagacatgtaaagctcaagctgctcctaagtcattatttgaaaatcagaatataacagtgatcccatcgggctttcgagttggtatgaagcttgaggcagtagacaaaaagaatccctcattcatctgtgttgctacggtaacagatatggtggacaatcgtttcctggtacattttgacaactgggatgagagctatgactattggtgtgaagcatcaagtccacatattcatccagttggttggtgtaaggaacatagaagaacccttattactccaccaggttatccaaatgtgaaacatttttcttgggataaatacttagaagaaaccaattctttacctgctcctgcaagagctttcaaagtgaaacctcctcatggattccagaaaaaaatgaagcttgaggttgtagacaaaaggaaccctatgtttattagagtagcaactgtggcagacacagatgatcaccgggtaaaagttcactttgatggctggaacaattgctatgattactggatagatgcagattctcctgatattcaccctgtaggctggtgttcaaaaacaggacatccccttcagcctcctttgagccccttagaattaatggaagcttcagaacatggtggatgctcaaccccgggatgtaaagggattggccatttcaagagagcgagacatctgggccctcacagtgctgccaactgtccctattcagaaatcaatttgaataaagaccgtatttttccagaccgcttaagtggtgagatgcctccggctagtccgtcatttccaagaaataaaaggacagatgcaaatgaaagctcttcttcccctgaaatcagagaccagcatgctgatgatgtcaaagaagactttgaagagagaacagaaagtgaaatgagaacatcacatgaagccagaggtgcccgggaagaacccaccgtccagcaggcacagcgtcggtcagctgtctttctgtcctttaagtccccaattccatgtctgcccttgcgctgggagcagcaaagcaaacttcttccaactgtcgcaggaatccctgccagtaaagtttccaaatggagcacagacgaggtgtcagaatttatacagagcttacctgggtgtgaagaacatggaaaggtatttaaagatgaacaaattgatggagaagcatttctacttatgactcaaacagacattgttaaaattatgagcattaaactgggccctgctctcaaaattttcaattccatcctgatgttcaaagctgcagagaagaattctcacaatgaactttga

SEQ ID NO: 523 - DNA, 615 bp, Homo Sapiens
atggaattaaagcaatctttgtccacccatctggaagccgagaagcctctgaggcgctatggggcggtggaggagacggcttggaaaacggagagactggggagaaatcagctggacatcatctccatggcggagacaaccatgatgccagaggagattgagctggagatggcaaaaattcagcgtctccgggaagtcttggtccgccgggagtctgagctcaggttcatgatggatgacatccagctctgcaaggacatcatggacttgaagcaggagctgcagaacttggtcgccatcccagaaaaagaaaaaaccaaactgcagaagcagagagaggatgagctaatccagaagatccacaaactggtgcagaagagagacttcctggtggacgatgcggaggtcgagcggttaagggagcaagaagaagacaaggaaatggctgatttcctgagaatcaagttaaaacctctagacaaagtaaccaaatctccagccagctcccgggcagagaagaaagcagagcccccacctagcaagcccacggtggccaagacggggctggcactgatcaaggattgttgcggggccacccagtgcaacatcatgtag

SEQ ID NO: 524 - DNA, 1554 bp, Homo Sapiens
atggtagacaaaaccccagttatgtgttctcattttgcccaagatgtttggccagagcacagcataaaagattctttccaaaaagtgatactgagaacatatggaaaatatggacatgagaatttacagctaagaaaagaccataaaagtgtggatgcatgtaaggtgtacaaaggaggttataatggacttaaccagtgtttgacaactactgacagcaagatatttcagtgtgataaatatgtgaaagtctttcataaatttccaaatgtaaatagaaataagataagacatactggaaagaaacctttcaaatgtaaaaaccgtggcaaatcattttgcatgctttcacaattaactcaacataagaaaattcatactagagagtattcttacaaatgtgaagaatgtggtaaagcctttaactggtcctcaacccttactaaacataagataattcatactggagaaaaaccctacaaatgtgaagaatgtggcaaagcttttaaccggtcctcaaatcttactaaacataaaataattcatactggagagaaaccctacaaatgtgaagaatgtggcaaagcttttaaccggtcctcaacccttactaaacataaaagaattcatacagaagagaaaccctacaaatgtgaagaatgtggcaaggcctttaaccagttctcgattcttaataaacataagagaattcatatggaagataaaccctacaaatgtgaagaatgtggcaaagcctttagagtattctcaattcttaaaaaacataagataatccatactggggaaaaaccatacaaatgtgaagaatgtggcaaagcctttaaccagttctcaaaccttactaaacataagataattcatactggagagaaaccctacaaatgtgatgaatgtggcaaagcctttaaccagtcctcaacccttactaaacataaaagaattcatacgggagaaaaaccctacaaatgtgaagaatgtggcaaagcttttaaacagtcctcaacccttactgaacataagataattcatactggagagaaaccctacaaatgtgaaaaatgtggcaaggcctttagctggtcctcagcttttactaaacataagagaaatcatatggaagataaaccctacaaatgtgaagaatgtggcaaagcctttagtgtattctcaacccttactaaacataaaataattcatactagagaaaaaccctacaaatgtgaagaatgtggcaaagcctttaaccagtcctcaatttttactaaacataagataattcacactgaagggaaatcctacaaatgtgaaaaatgtggcaatgcttttaaccagtcctcaaaccttactgcacgtaagataatttatactggagagaaaccctacaaatatgaagaatgtgacaaagcctttaacaagttctcaacccttattacacatcagataatttatactggagagaaaccctgcaaacatgaatgtggcagagcctttaacaaatcctcaaattatactaaagagaaactacaaacctga

SEQ ID NO: 525 - DNA, 5172 bp, Homo Sapiens
atggagaagaggtccagcggccgtaggtcggggaggcggagggggtcgcagaaatccaccgactcccccggcgcggacgccgagctccctgagagcgctgccagggacgacgcggtgttcgacgacgaggtggcgccaaacgcggccagcgataacgcctcggcggaaaagaaagtgaaatctccgcgggcagccctcgacgggggcgttgcctccgctgcgagcccagagtccaagcccagccccggtaccaaagggcagctccgaggggagtcggaccggagcaaacagccacccccggcttcgtcccccacgaagaggaagggcaggagccgtgccctcgaggccgtgcccgccccgcccgccagcggcccccgggctcccgccaaggagtccccacccaagagggtgcccgatcccagcccagtcaccaagggcactgcggccgagagcggggaggaggcggcgcgggccatcccccgcgagctcccggtcaagagcagctcgctgctgccggagatcaagcccgagcacaagaggggcccgctccccaaccacttcaacggccgggcagagggaggtcgaagcagagagctgggcagagcggccggagcgcctggagcttctgacgccgacggcttgaagcccaggaaccatttcggcgtgggcaggtcgacagtgaccactaaagtgaccctccctgccaagcccaaacatgtggaactaaatcttaaaacccctaagaatcttgacagtttgggaaatgagcacaatccatttagccagccagttcacaaaggcaacactgccaccaaaatctccttatttgaaaacaaacggacaaacagtagcccaagacacactgacattcgaggccaaaggaatactcctgcctctagtaaaacgtttgttgggagggcaaagctgaatttagccaaaaaagccaaagaaatggagcaacctgaaaagaaagtaatgccaaacagtccccagaatggtgtgctggttaaggaaactgctatagaaaccaaagttaccgtctcggaagaagagattctgccagcaaccagaggaatgaatggagactcttctgagaatcaagctcttggtcctcagcctaaccaagatgataaagcagatgtacaaacagatgctggctgcctttcagaaccagtggcttctgctctgattcctgtcaaggatcataagctcttagagaaggaggactcagaggctgcagacagcaaaagccttgtacttgaaaatgtaaccgatacagcacaagacatccccaccactgtggataccaaagatttacctccaacggccatgccaaagccacagcatacattttctgactcacagtcccctgctgagtcatctcctgggccttctctttcactgtctgcacccgctcctggggatgttcccaaagacacatgtgttcaatcacccataagcagtttcccatgcactgatctaaaagtgtcagaaaaccataaaggatgtgttttgcctgtgtctcgtcagaacaatgagaaaatgccacttttagaacttggaggagaaacaacccctcctttgtccacagagcgtagtccagaagctgtgggaagtgagtgtccatccagagtcctcgtccaggtcaggtccttcgtgctccccgtggagagcacccaggatgtgagctcccaggtcatcccagagagctctgaagttagagaagtgcagttgccaacttgtcacagtaatgaacctgaagtggtttccgttgcaagttgtgctcccccacaagaggaagtactgggcaatgaacactctcattgcacagcagagctcgcggcaaaatctggcccacaagtcataccgccagcatcagagaaaactctgcctattcaggctcaaagtcagggcagcagaacacccctgatggctgaatccagtcccaccaactctcccagcagcggaaatcacttagccactcctcaaaggccagatcagactgttacaaatggccaggatagccctgccagccttttgaacatttctgctggtagtgatgatagtgtatttgattcttcttctgatatggaaaaattcactgaaattataaaacagatggatagcgcagtttgtatgcccatgaaaagaaagaaggccaggatgccaaactctcctgctcctcactttgccatgcctcctattcacgaagaccatttagaaaaggtgtttgatcccaaagtgtttacctttggtttggggaagaagaaggaaagtcagccagaaatgtcaccggctttacatttgatgcagaaccttgacacaaaatccaaactgagacccaaacgtgcatctgctgaacagagcgtcctcttcaagtccctgcacaccaacactaatgggaacagtgagcctctggtgatgccggaaatcaatgacaaagagaacagggacgtcacaaatggtggcattaagagatcgagactagaaaaaagtgcacttttctcaagcttgttatcttctttaccacaagacaaaatcttttctccttctgtgacatcagtcaacactatgaccacggctttcagtacttctcagaacggttccctatctcagtcttcagtgtcacagcccacgactgagggtgccccgccctgtggtttgaacaaagaacagtcaaatcttctgcccgacaactccttaaaggtcttcaatttcaactcgtcaagtacatcacactccagtttgaaaagtccaagccacatggaaaaatacccgcaaaaagagaaaaccaaagaagatctggattcacgaagcaacctacacttgccagaaactaaattttctgaattgtcaaaactgaagaatgatgatatggaaaaggctaatcatattgaaagtgttattaaatcaaacttgccaaactgtgcaaacagtgacaccgacttcatgggtcttttcaaatcaagccggtatgacccaagcatttctttttctggaatgtcattatcagacacaatgacacttagaggaagtgtccaaaataaactcaatccccgacctggaaaggtagtgatatatagtgaacccgacgtctctgagaagtgcattgaagttttcagtgacattcaggattgcagttcttggagcctctctccagtgatactcataaaagttgttagaggatgttggattttgtatgagcaaccaaattttgaagggcactccatccccttagaagaaggagaattggaactctctggtctctggggtatagaagacattttggaaaggcacgaagaagcagagtctgataagccagtggtgattggttccatcagacatgtggttcaggattacagagttagtcacattgacttatttactgaaccagaagggttaggaatcctaagttcctactttgatgatactgaagaaatgcagggatttggtgtaatgcagaagacttgttccatgaaagtacattggggcacgtggctgatttatgaagaacctggatttcagggtgttcctttcatcctggaacctggtgaataccctgacttgtccttctgggatacagaagcagcgtacattggatccatgcggcctctgaaaatgggtggccgtaaagttgaattccctacagatccaaaggtagttgtttatgaaaagcctttctttgaaggaaaatgtgtggaactagaaacaggaatgtgtagttttgtcatggagggaggtgaaacagaagaggcgactggagacgatcatttgccgtttacgtcagtggggtctatgaaagttctaagaggcatttgggttgcatatgagaaacctggatttaccggtcatcagtatttgctagaagaaggagaatacagggactggaaagcctggggaggttacaatggagagcttcagtctttacgacctatattaggtgatttttcaaatgctcacatgataatgtacagtgaaaaaaactttggatccaaaggttccagtattgatgtattgggaattgttgctaatttaaaggagactggatatggagtgaagacacagtctattaatgtactgagtggagtatgggtagcctatgaaaatcctgacttcacaggagaacagtatatactggataaaggattttataccagttttgaggactggggaggcaaaaattgtaagatctcttctgttcaacctatatgtttggattctttcactggcccaaggagacgaaatcagattcacttgttttcagaaccacagtttcaaggtcacagtcaaagttttgaagaaacaacaagtcaaattgatgattcattttctaccaagtcttgcagagtttcaggaggcagctgggttgtatatgatggagaaaatttcactggtaatcaatacgtgttggaagaaggccattatccttgtctgtctgcaatgggatgcccgcctggagcaactttcaagtctcttcgttttatagatgttgaattttctgaaccaacaattattctctttgaaagagaagacttcaaaggaaaaaagattgaacttaatgcagaaactgtcaatctccgatccctgggattcaacacacaaatacgctctgttcaggttattggtggcatatgggttacttatgaatatggcagttacagagggcgacagttcctattgtcacctgcagaagtacctaattggtatgaattcagtggctgtcgccaaataggttctctacgaccttttgttcagaagcgaatttatttcagacttcgaaacaaagcaacagggttattcatgtcaaccaatggaaacttagaggatctgaagcttctgaggatacaggtcatggaggatgtcggggccgatgatcagatttggatctatcaagaaggatgtatcaaatgcaggatagcagaagactgctgcctgacgattgtgggcagcctggtaacatctggctccaagctaggcctggccctggaccagaatgctgacagccagttctggagcttgaagtccgatggcaggatttacagcaagttgaagccaaatttagttttagacattaaagggggcacacagtatgatcaaaatcacattatcctcaacactgtcagcaaagagaagtttacacaagtgtgggaagccatggtcctatatacctga

SEQ ID NO: 526 - DNA, 984 bp, Homo Sapiens
atgcccgcactcctggagcgccccaagctttccaacgccatggccagggcgctgcaccggcacattatgatggagcgggagcgcaagcggcaggaggaagaagaggtggataagatgatggaacagaagatgaaggaagaacaggagagaaggaagaaaaaggagatggaagagagaatgtcattagaggagaccaaggaacaaattctgaagttggaggagaagcttttggctctacaggaagagaagcaccagcttttcctgcagctcaagaaagttttacatgaggaagaaaaacggaggcgaaaggaacagagtgacctgaccaccctaacatcagctgcataccagcagagcctgactgttcacacaggaactcatctcctcagcatgcaggggagccctggaggacacaatcgcccaggcaccctcatggcagctgacagagccaaacaaatgtttggaccccaagtgcttacgacccggcactacgtgggctcagcagctgcttttgcagggacaccagagcatggacaattccaaggcagtcctggtggtgcctatgggactgctcagcccccacctcactatgggcccacacagccagcttatagtcctagtcagcagctcagagctccttcggcattccctgcagtgcagtacctatctcagccacagccacagccctatgctgtgcatggccactttcagcccactcagacaggtttcctccagcctggtggtgccctgtccttgcaaaagcagatggaacatgctaaccagcagactggcttctccgactcatcctctctgcgccccatgcacccccaggctctgcatccagcccctggactccttgcttccccccagctccctgtgcagatgcagccagcaggaaagtcgggctttgcagctaccagccaacctggccctcggctccccttcatccaacacagccagaacccgcgattctaccacaagtga

SEQ ID NO: 527 - DNA, 621 bp, Homo Sapiens
atggccgaagacgcagacatgcgcaatgagctggaggagatgcagcgaagggctgaccagttggctgatgagtcgctggaaagcacccgtcgtatgctgcaactggttgaagagagtaaagatgctggtatcaggactttggttatgttggatgaacaaggagaacaactcgatcgtgtcgaagaaggcatgaaccatatcaaccaagacatgaaggaggctgagaaaaatttaaaagatttagggaaatgctgtggccttttcatatgtccttgtaacaagcttaaatcaagtgatgcttacaaaaaagcctggggcaataatcaggacggagtggtggccagccagcctgctcgtgtagtggacgaacgggagcagatggccatcagtggcggcttcatccgcagggtaacaaatgatgcccgagaaaatgaaatggatgaaaacctagagcaggtgagcggcatcatcgggaacctccgtcacatggccctggatatgggcaatgagatcgatacacagaatcgccagatcgacaggatcatggagaaggctgattccaacaaaaccagaattgatgaggccaaccaacgtgcaacaaagatgctgggaagtggttaa

SEQ ID NO: 528 - DNA, 729 bp, Homo Sapiens
atgcccggcccttggttgctgctcgctctggctttgaccctgaacctgaccggtgtccccggcggccgtgctcagccagaggcggcccagcaggaggcagtgacggccgcggagcatccgggcctggatgacttcctgcgccaggtggagcgcctcctcttcctccgggaaaacatccagcggctgcaaggggaccagggtgagcactccgcgtcccagatctttcaatctgactggctctccaaacgtcagcatccaggcaaaagagaggaggaggaggaagagggagttgaagaagaggaagaggaagaagggggggctgtgggaccccacaaacggcagcaccctggccgacgagaagatgaggcttcatggtcagtcgatgtaacccagcacaagcggcagcatcctggccggcgctccccctggcttgcatatgctgtcccgaagcggcagcacccaggcagaaggctggcagatcccaaggctcaaaggagctgggaagaagaggaggaggaggaagagagagaggaagacctgatgcctgaaaaacgccagcatccgggcaagagggccctgggaggcccctgtgggccccagggagcctatggtcaagcgggccttctgctggggctcctggatgacctgagtaggagccagggagctgaggaaaagcggcagcaccctggtcggcgggcagcctgggtcagagagcccctggaggagtga

SEQ ID NO: 529 - DNA, 999 bp, Homo Sapiens
atggacagcaccagctcactgcacgggagcagcctccatcggccatcgactgagcaaactcgaactgatttctcctgggacggcatcaacctctccatggaggacaccacttccattcttccgaagcttaagcgaaactctaacgcctatggcattggggccctggccaagtcatcattctcagggatctcacggagcatgaaggaccatgtgacaaagcccacagccatggggcaaggccgggtggcccacatgattgagtggcagggctgggggaagacaccagctgttcagccacaacacagccatgagtccgtgcgcagggatacggatgcctactccgacctcagcgatggcgagaaggaggcacgttttctagcaggcgtcatggagcagtttgctatctctgaggccacactcatggcctggtcttccatggatggtgaggacatgagtgtgaactccacccaggagccattgggctgcaactacagtgacaactaccaggaactgatggacagtcaggatgccctggctcaagcacccatggatggatggcctcactcttacgtgtcccagggtatgtactgtctggggtcgtcagatgcctgggaagccagcgatcagtccctcattgcctctccggccacaggatcctatcttgggcctgcatttgatgactcacaacccagcttgcatgaaatgggaccttcccaaccagcttcaggatactctgctctggagcctccacctttgctggggggagacactgactgggctccgggggtaggcgcagtggacctggcaaggggccctgctgaggaggagaagaggccattggcacctgaggaggaagaggatgcgggatgccgggacctggagtcactttccccacgagaagaccctgagatgtctaccgctctcagccggaaggtgtctgacgtcacatcctcaggtgtgcagtcctttgatgaggaggaaggcgaggccaacaactag

SEQ ID NO: 530 - DNA, 3537 bp, Homo Sapiens
atgagcctgcagagcgcgcagtacctccggcaggcagaagtcctgaaggctgacatgacagattctaagctgggtccagctgaagtctggacatccaggcaggctctgcaggacctgtaccagaaaatgctagttaccgatttggaatacgctttagacaagaaagtagaacaggatctctggaatcacgcctttaagaatcagatcacaacactgcaaggccaggcaaagaatcgagcaaatccgaatcggagtgaagttcaggcaaacctttctctgttcctagaggcagctagtggcttctatactcagttattacaagaactgtgtacagtatttaatgtagatttaccatgccgtgtgaagtcttcccaattgggaattatcagcaataaacagacgcataccagcgccatagtgaagccacagtctagctcctgttcctatatctgccagcactgcctcgtccaccttggagacattgctcgatacagaaaccagaccagccaggcagagtcctactataggcatgcagctcagcttgtcccctccaatggtcagccttataatcagttggctatcttagcttcttccaaaggagaccatctgaccacaattttctactactgcagaagcattgctgtgaagttccctttcccagctgcctccactaatctgcaaaaagcactttctaaagcactggaaagccgagatgaggtgaaaaccaagtggggtgtttctgacttcatcaaggcctttattaaattccacggtcatgtgtacctgagtaagagcttggaaaagttgagccctcttcgagagaaattggaagaacagtttaagaggctgctattccaaaaagctttcaactctcagcagttagttcatgtcactgtcattaacctgtttcaacttcatcaccttcgtgactttagcaatgaaaccgagcagcacacttatagccaagatgagcagctatgttggacacagttgctggccctctttatgtcttttcttggcatcctgtgcaagtgtcctctacagaatgagtctcaggaggagtcctacaatgcctatcctcttccagcagtcaaggtctccatggactggctaagactcagacccagggtctttcaggaggcagtggtggatgaaagacagtacatttggccctggttgatttctcttctgaatagtttccatccccatgaagaggacctctcaagtattagtgcgacaccacttccagaggagtttgaattacaaggatttttggcattgagaccttctttcaggaacttggatttttccaaaggtcaccagggtattacaggggacaaagaaggccagcaacgacgaatacgacagcaacgcttgatctctataggcaaatggattgctgataatcagccaaggctgattcagtgtgaaaatgaggtagggaaattgttgtttatcacagaaatcccagaattaatactggaagaccccagtgaagccaaagagaacctcattctgcaagaaacatctgtgatagagtcgctggctgcagatgggagcccagggctaaaatcagtgctatctacaagccgaaatttaagcaacaactgtgacacaggagagaagccagtggttaccttcaaagaaaacattaagacacgagaagtgaacagagaccaaggaagaagttttcctcccaaagaggtaaaatcccagacagaactaagaaagactccagtgtctgaagccagaaaaacacctgtaactcaaaccccaactcaagcaagtaactcccagttcatccccattcatcaccctggagccttccctcctcttcccagcaggccagggtttccgcccccaacatatgttatccccccgcctgtggcattttctatgggctcaggttacaccttcccagctggtgtttctgtcccaggaacctttcttcagcctacagctcactctccagcaggaaaccaggtgcaagctgggaaacagtcccacattccttacagccagcaacggccctctggaccagggccaatgaaccagggacctcaacaatcacagccaccttcccagcaaccccttacatctttaccagctcagccaacagcacagtctacaagccagctgcaggttcaagctctaactcagcaacaacaatcccctacaaaagctgtgccggctttggggaaaagcccgcctcaccactctggattccagcagtatcaacaggcagatgcctccaaacagctgtggaatccccctcaggttcaaggcccattagggaaaattatgcctgtgaaacagccctactaccttcagacccaagaccccataaaactgtttgagccgtcattgcaacctcctgtaatgcagcagcagcctctagaaaaaaaaatgaagccttttcccatggagccatataaccataatccctcagaagtcaaggtcccagaattctactgggattcttcctacagcatggctgataacagatctgtaatggcacagcaagcaaacatagaccgcaggggcaaacggtcaccaggagtcttccgtccagagcaggatcctgtacccagaatgccgtttgaggaccccaagagctcccctctgcttcctccggacctgttaaagagtctggctgccttggaggaagaggaagagctgattttttctaaccctcctgatctttacccggctctgctggggcctctcgcctctcttcctggacgaagcctttttaaatccttattggagaagccctcagagctcatgtcacattcatcctctttcctgtccctcaccggattctctctcaatcaggaaagatacccaaataatagtatgttcaatgaggtatatgggaaaaacctgacatccagctccaaagcagaactcagtccctcaatggccccccaggaaacatctctgtattccctttttgaagggactccgtggtctccatcacttcctgccagttcagatcattcaacaccagccagccagtctcctcattcctctaacccaagcagcctacccagctctcctccaacacacaaccataattctgttccattctccaattttggacccattgggactccagataacagggatagaaggactgcagatcggtggaaaactgataagccagccatgggtgggtttggcattgattatctctcagcaacgtcatcctctgagagcagttggcatcaggccagcactccgagtggcacctggacaggccatggcccttccatggaggattcctctgctgtcctcatggaaagcctaaagaagcaacagcatggggtccagcagttggggcccaaaagacagtctgaagaggaaggaagcagcagtatctgcgtagcccacagagggcccaggcccctgcccagctgcagtctcccagcctccactttcagagtgaaattcaaggcagcacggacatgtgcccatcaggcacagaagaaaacacgacgtcgtccattttggaagagacgaaagaaaggaaaataa

SEQ ID NO: 531 - DNA, 1086 bp, Homo Sapiens
atgtacggcaaaggcaagagtaacagcagcgccgtcccgtccgacagccaggcccgggagaagttagcactctacgtatatgaatatctgctccatgtaggagctcagaaatcagctcaaacatttttatcagagataagatgggaaaaaaacatcacattgggggaaccaccaggattcttacattcttggtggtgtgtattttgggatctctactgtgcagctccagagagacgtgaaacatgtgaacactcaagtgaagcaaaagccttccatgattacagtgctgcagcagctcccagtccagtgctaggaaacattcccccaggagatggcatgccagtaggtcctgtaccaccagggttctttcagccttttatgtcacctcggtaccctggaggtccaaggcccccattgaggatacctaatcaggcacttggaggtgtcccaggaagtcagccattactccccagtggaatggatccaactcgacaacaaggacatccaaatatgggtgggccaatgcagagaatgactcctccaagaggaatggtgcccttaggaccacagaactatggaggtgcaatgagacccccactgaatgctttaggtggccctggaatgcctggaatgaacatgggtccaggtggtggtagaccttggccaaacccaacaaatgccaattcaataccatactcctcagcatctcctgggaattatgtaggtcctccaggaggtggagggccaccaggaacacccatcatgcctagtccagcagattcaaccaactctggtgataacatgtatactttaatgaatgcagtacctcctggacctaacagacctaattttccaatgggtcctgggtcagatggtcccatgggtggattaggaggaatggagtcacatcacatgaatggctctttaggctcaggagatatggacagtatttccaagaattctcccaataatatgagcctgagtaatcaaccgggcactccaagggatgatggcgaaatggggggaaatttcttaaatccttttcagagtgagagttactcccctagcatgacaatgagcgtgtga

SEQ ID NO: 532 - DNA, 753 bp, Homo Sapiens
atgtcgatcttcacccccaccaaccagatccgcctaaccaatgtggccgtggtacggatgaagcgtgccgggaagcgcttcgaaatcgcctgctacaaaaacaaggtcgtcggctggcggagcggcgtggaaaaagacctcgatgaagttctgcagacccactcagtgtttgtaaatgtttctaaaggtcaggttgccaaaaaggaagatctcatcagtgcgtttggaacagatgaccaaactgaaatctgtaagcagattttgactaaaggagaagttcaagtatcagataaagaaagacacacacaactggagcagatgtttagggacattgcaactattgtggcagacaaatgtgtgaatcctgaaacaaagagaccatacaccgtgatccttattgagagagccatgaaggacatccactattcggtgaaaaccaacaagagtacaaaacagcaggctttggaagtgataaagcagttaaaagagaaaatgaagatagaacgtgctcacatgaggcttcggttcatccttccagtcaatgaaggcaagaagctgaaagaaaagctcaagccactgatcaaggtcatagaaagtgaagattatggccaacagttagaaatcgtatgtctgattgacccgggctgcttccgagaaattgatgagctaataaaaaaggaaactaaaggcaaaggttctttggaagtactcaatctgaaagatgtagaagaaggagatgagaaatttgaatga

SEQ ID NO: 533 - DNA, 1470 bp, Homo Sapiens
atgaaagagttggatccaaagaatgacatttcggaagacaagctctccgttgttggggaggccacggggggacccacgaggaatggtgccaggggtcctggctcagaaggagtgtgggaaccaggcagctggccagagaggccgcggggagatgcaggtgcagagtgggagccattgggaattccccaggggaacaaactcttagggggctcagtacccgcatgtcatgaactgaaggcatttgccaaccaaggctgtgtcctggtcccaccacggctggacgaccccacagaaaagggggcctgtccacccgtaaggcgtggcaagaacttctccagcacttcagacctcagtaagccccccatgccctgcgaggagaagaaaacctacgactgcagcgagtgtggcaaggcctttagccgaagctcgtccctgataaagcaccaaaggatccacacgggagaaaagccgtttgagtgtgacacctgtgggaagcacttcatcgagcgctcgtccctcaccatccaccagcgggtgcacacgggcgagaagccctatgcctgcggggactgcggcaaggccttcagccagcgcatgaacctcactgtgcaccagcgcacgcacacgggcgagaagccgtatgtgtgcgacgtgtgtggcaaggccttccggaagacttcctctctcacccagcacgagcggatccacacgggggagaagccctacgcgtgcggggactgcggcaaggccttcagccagaacatgcacctcatcgtgcaccagcgcacgcacaccggggagaagccgtacgtgtgccccgagtgcgggcgagccttcagccagaacatgcacctgaccgagcaccagcgcacgcacaccggggagaagccgtacgcctgcaaggagtgcggcaaggccttcaacaagagctcctcgctcaccctgcaccagaggaaccacaccggcgagaagccctacgtgtgcggcgagtgcggcaaggccttcagccagagctcctacctcatccagcaccagcgcttccacatcggcgtgaagccgttcgagtgcagcgagtgcggcaaggccttcagcaagaactcctcgctcacgcagcaccagcgcatccacaccggcgagaagccctacgagtgctacatctgcaagaagcacttcacggggcgctcgtccctcatcgtgcaccagatcgtgcacaccggggagaagccctacgtgtgcggcgagtgcggcaaggccttcagccagagcgcctacctcatcgagcaccagcggatccacaccggcgagaagccgtacaggtgcggccagtgcgggaagtccttcatcaagaactcctccctcactgtgcaccagcggatccacacgggcgagaagccctaccgatgcggcgagtgcgggaagaccttcagccgcaacacgaacctgacgcgccacctgcggattcacacctga

SEQ ID NO: 534 - DNA, 1143 bp, Homo Sapiens
atggcggcgccctggtggcgagccgcgctgtgcgagtgtcggagatggcggggcttcagcacctcggccgtcctgggccgccggacacccccgctggggccgatgcccaacagtgacatcgacttgagcaacctggagcggctggagaagtaccggagcttcgaccgctaccggcgccgagcagagcaggaggcgcaggccccgcactggtggcggacctaccgagagtatttcggggagaagacagatcccaaagagaagattgatattgggctgcctccacccaaagtctcccggacccaacagctactggaacggaaacaggccatccaggagcttcgggccaatgtggaagaggagcgggctgcccgcctccgcacagccagtgtcccgctggatgccgtgcgggccgagtgggagaggacctgtggcccctaccacaagcagcgtctggctgagtattacggcctctaccgagacctgttccacggtgccacctttgtgccccgagtccccctgcacgtggcctacgctgtgggtgaggatgacctgatgcctgtgtactgtggcaatgaggtgactccaaccgaggctgcccaagcgccagaggtgacctatgaggcagaagagggctccttgtggacgttgctactcactagcttggatgggcacctgctggagccagatgctgagtacctccactggctgctaaccaacatcccgggtaaccgggtggctgaaggacaggtgacgtgtccctacctcccccccttccctgcccgaggctccggcatccaccgtcttgccttcctgctcttcaagcaggaccagccgattgacttctctgaggacgcacgcccctcaccctgctatcagctggcccagcggaccttccgcacttttgatttctacaagaaacaccaagaaaccatgactccagccggcttgtccttcttccagtgccgctgggatgactccgtcacctacatcttccaccagcttctggacatgcgggagccggtgtttgagttcgtgcggccgcccccttaccaccccaagcagaagcgcttcccccaccggcagcccctgcgctacctggaccggtacagggacagtcatgagcccacctatggcatctactaa

SEQ ID NO: 535 - DNA, 939 bp, Homo Sapiens
atggccgctggcgtggactgcggggacggggttggcgcccggcagcacgtgttcctggtttcagaatatttaaaagatgcttcaaagaagatgaaaaatgggctaatgtttgtaaaactggttaacccctgttcaggagaaggagccatttacttgttcaatatgtgtctacagcagctgtttgaagtaaaagttttcaaggaaaaacaccattcttggtttataaatcaatcagttcaatcaggaggtcttctccattttgccacacctgtggatcctctatttctgcttctccactacctcataaaggctgataaggaggggaagtttcagccccttgatcaagttgtggtggataacgtgtttccaaattgcatcttgttgctgaaacttcctggacttgagaagttacttcatcatgtgacagaggaaaaaggtaatccagaaatagacaacaagaaatattacaagtacagcaaagagaagacattaaagtggctggaaaaaaaggttaatcaaactgtggcagcattaaaaaccaataatgtgaatgtcagttcccgggtacagtcaactgcatttttctctggtgaccaagcttccactgacaaggaagaggattatattcgttatgcccatggtctgatatctgactacatccctaaagaattaagtgatgacttatctaaatacttaaagcttccagaaccttcagcctcattgccaaatcctccatcaaagaaaataaagttatcagatgagcctgtagaagcaaaagaagattacactaagtttaatactaaagatttgaagactgaaaagaaaaatagcaaaatgactgcagctcagaaggctttggctaaagttgacaagagtggaatgaaaagtattgataccttttttggggtaaaaaataaaaaaaaaattggaaaggtttga

SEQ ID NO: 536 - DNA, 2322 bp, Homo Sapiens
atggccaggagcagcagtctgggccgcgagtgcgggacaccgaggtcaggtctcggaaagggaggacctcctcgtccccaggggccccaggccaggtgcacccttggccgcaggtgcacggtctccggaaagtgcaggcgcccacgtcccagctggaccatggcgcctccgcggaacgtggtgaagattgccatcaagatgcgtgacgccatcccgcagctcatccagctggaccaggcgaagcccctggccgctgtgctgaaggaggtgtgcgacgcgtggagcctgacgcactctgagcgttacgccctgcagtttgcggatgggcaccggagatacatcaccgagaataaccgcgcggagatcaagaatggcagcatcctgtgcctcagcacggccccagaccttgaggctgagcagctcttgggtgggctgcagagtaacagtcctgaagggcgccgggaagccctgaggcgccttgttccgctggcctcggacatgatctttgccagggaggtcatcagccgtaatgggctccagatactaggcaccatcattgaagatggggacgacctaggagaggtgctggccctcagcctgagggccttctcagagctcatggagcacggcgtggtgtcctgggagactctgagcatcccctttgtgaggaaggtggtgtgctacgtgaacatgaacctcatggatgcctccgtgcctcccctggcccttgggctgctggagagtgtgaccttgagcagcccagccctgggccagctggtcaagagcgaggtgcccctggataggctgctggtgcacctacaggtgatgaaccagcagctgcaaaccaaggccatggccctgctgacagccttgctgcagggggccagccctgtggaacgcaagcacatgcttgactatctttggcagaggaaccttcgccagttcatctataagaacatcatccacagtgcagcaccaatgggcgacgagatggctcatcacctgtacgtactgcaggctctcatgctggggctgctggagccgcgcatgcggacgcccctggacccctacagccaggagcagcgggagcagctgcaggtcctacgccaggctgccttcgaggtggagggggagtcctcgggtgccgggctaagtgctgaccgtcgccgttccctctgtgcccgagagttccgcaaactgggcttttctaacagcaacccagcacaggacctggagcgcgtgccccccggtctgctggccctggacaacatgttgtacttctccagaaacgcgcccagcgcgtacagccggtttgtgttggagaacagcagccgcgaggacaagcacgagtgcccctttgcccggggcagcatccagctgacggtgctgctgtgtgagctgctccgtgttggggagccctgctctgagacagcccaggacttctcacccatgttcttcggccaagaccagagcttccacgagctcttctgtgtgggcatccagctgttgaataagacctggaaggagatgcgggctacacaggaggacttcgacaaggtcatgcaggtggtgcgggagcagctggcccgcactctggccctgaagcccacttccctggagctcttccgaaccaaggtgaatgcgctcacttatggggaggtgctgcggctgcggcagactgaacggctgcaccaggagggcacactggctccccctatactggagctgcgggagaagctgaagccagagctcatgggcctgatccgccagcagcgcttgctccgcctctgtgaggggacgctcttccgcaagatcagcagccggcggcgccaggataagctgtggttctgctgcctgtcccccaaccacaagctgctgcagtacggagacatggaggagggcgccagcccgcctaccctggagagtctgcccgagcaactccctgtggccgacatgagggcactcctgacaggcaaggactgcccccatgtccgggagaagggctccgggaagcagaacaaggacctctatgagttggccttctcaatcagctatgaccgtggggaggaggaagcgtacctcaacttcattgccccctccaagcgggagttctacctgtggacagatgggctcagtgccttgctgggcagtcccatgggcagcgagcagacacggctggacctggagcagctgctgaccatggagaccaagctgcgtctgctggagctggagaacgtgcccatccccgagcggccaccccctgtgcccccaccccccaccaacttcaacttctgctatgactgcagcatcgctgaaccttga

SEQ ID NO: 537 - DNA, 744 bp, Homo Sapiens
atggcgccgctgcgcttctccgccaatctgtcctggctattccccgagctctccggcctccccgcgcgggtgcgggccgcgggcagctcgggcttcgaggccgtcgaggtggcctggccgtacgcggagacgcctgaggcgctggcgcgcgccgcgcgagaagcggggctgcggcttgtactgatcaacacgcccccgggagaccaagagaagggggaaatggggctgggggccgtccccgggagacaggcggccttccgagagggactggagcaggccgtgcggtatgccaaagccctgggctgtcccaggatccacctgatggctggccgagtaccccagggagctgatcgaatagcagtcaaggctgagatggaggccgtttttctggagaacctgaggcatgcagctggggttttggctcaggaggacctcgtgggactgctggagcccatcaacacccgcatcactgacccccagtacttcctggacacgccccagcaggcggcagccatcttacagaaggtaggaagacccaacctccaattacaaatggacatattccactggcagatcatggatgggaacctgacaggaaacatccgggagttcctgcccattgttgggcatgtgcaggtggcacaggtcccaggccgaggggagcccagcagccccggagagctgaatttcccctatctgtttcaactgctggaagatgaaggctacaaaggcttcgtgggctga

SEQ ID NO: 538 - DNA, 849 bp, Homo Sapiens
atggcttcatcattcctgcccgcgggggccatcaccggcgacagcggtggagagctgagctcaggggacgactccggggaggtggagttcccccatagccctgagatcgaggagaccagttgcctggccgagctgtttgagaaggctgccgcgcacctgcaaggcctgattcaggtggccagcagggagcagctcttgtacctgtatgccaggtacaaacaggtcaaagttggaaattgtaatactcctaaaccaagcttctttgattttgaaggaaagcaaaaatgggaagcttggaaagcacttggtgattcaagccccagccaagcaatgcaggaatatatcgcagtagttaaaaaactagatccaggttggaatcctcagataccagagaagaaaggaaaagaagcaaatacaggttttggtgggccagttattagttctctatatcatgaagaaaccatcagggaagaagacaaaaatatatttgattactgcagggaaaacaacattgaccatataaccaaagccatcaaatcgaaaaatgtggatgtgaatgtgaaagatgaagagggtagggctctacttcactgggcctgtgatcgaggacataaggaactagtcacagtgttgctgcaacatagagctgacattaactgtcaggacaatgaaggccaaacagctctacattatgcctctgcctgtgagtttctggatattgtagagctgctgctccagtctggtgctgaccccactctccgagaccaggatggctgcctgccagaggaggtgacaggctgcaaaacagtttctttggtgctgcagcggcacacaactggcaaggcttaa

SEQ ID NO: 539 - DNA, 2109 bp, Homo Sapiens
atggcccagaagcaccccggagaaagagggttgtatggagcccaccacagtggtggtgcctccctcaggactttaggaccctccgtggaccctgaaataccttcattctcaggactcagggactcagcagggactgctcctaatggtacccgctgcctcacagagcactctggtcctaagcacacacagcacccaaacccagcccattggttggacccaagccatggccccccagggggtccaggaccacctagagatgcagaggaccctgatcagagtgagacgtcttcagaagaagaatcaggagtggaccaggaactctcaaaagaaaacgagactgggaaccagaaggatgggaactcttttctttccattccatctgcttgcaactgccagggaacacctggaattccagaagggccttactctgagggaggaaatggttcttctagcaacttttgccaccactgtacctctccagctttgggggaagatgagttggaagaggaatatgatgatgaagaatctctcaagttccccagtgatttttcacgtgtgtccagcggaaagaaacccccatcccggagacagcggcaccgctttccaacgaaggaggatactcgggagggtggacgtagggatcccaggtcccctggtcgacatcggctgggtcggaaacgaagtcaggcagataagcgcaaaggcctgggattgtggggagccgaggaactatgtcaacttggacaggcaggcttttggtggctgattgaactgctggtattggtgggagagtacgtagaaacttgtggccatctcatctatgcctgcaggcaactgaaaagcagtgatttggacctttttcgagtttggatgggagtgtggacagggcggttagggggctgggcccaggtcatgtttcagtttctaagccaggggttttactgtggagtaggactgtttactcgttttcttaagctgctgggtgctttgctgctcctggctctggccctctttttgggctttctacagttgggatggcggtttctggtgggactaggtgaccggttaggctggagggataaggctacctggctcttctcttggctggattctccagccttgcagcgttgcttgactctgctgagagatagcaggccatggcagcggctggtaagaatagttcagtggggctggctggagttgccttgggtcaagcagaatattaataggcaggggaatgcacctgtagctagtgggcgctactgccagcctgaagaggaagtggctcgactcttgaccatggctggggttcctgaggatgagctaaaccctttccatgtactgggggttgaggccacagcatcagatgttgaactgaagaaggcctatagacagctggcagtgatggttcatcctgacaaaaatcatcatccccgggctgaggaggccttcaaggttttgcgagcagcttgggacattgtcagcaatgctgaaaagcgaaaggagtatgagatgaaacgaatggcagagaatgagctgagccggtcagtaaatgagtttctgtccaagctgcaagatgacctcaaggaggcaatgaatactatgatgtgtagccgatgccaaggaaagcataggaggtttgaaatggaccgggaacctaagagtgccagatactgtgctgagtgtaataggctgcatcctgctgaggaaggagacttttgggcagagtcaagcatgttgggcctcaagatcacctactttgcactgatggatggaaaggtgtatgacatcacagagtgggctggatgccagcgtgtaggtatctccccagatacccacagagtcccctatcacatctcatttggttctcggattccaggcaccagagggcggcagagagccaccccagatgcccctcctgctgatcttcaggatttcttgagtcggatctttcaagtacccccagggcagatgcccaatgggaacttctttgcagctcctcagcctgcccctggagccgctgcagcctctaagcccaacagcacagtacccaagggagaagccaaacctaagcggcggaagaaagtgaggaggcccttccaacgttga

SEQ ID NO: 540 - DNA, 1857 bp, Homo Sapiens
atggagcgcgcggtagagccttggggcccagatctccaccgcccggaggagagggagccacagagaggcgcccgcacaggtctagggagtgagaacgtgatttctcagccgaatgagtttgaacataccccacaggaagatgacttggggttcaaggaagaagatttggctccagatcatgaagtaggaaatgcctctctcaaacctgaaggcatccagaactgggatgacttatgggtccagagagagggtctaggaaagcctcagcctcgggacagaggcccccggctcctgggtgaaccacgctggggccaggctagtagtgatcgggccgctgtgtgtggtgagtgtggcaaaagcttcaggcagatgtcagatctggtgaaacaccagcggacccacacaggggagaaaccctacaagtgtggggtctgtggcaagggctttggggatagctctgcccggatcaaacaccagcggactcatagtggggagaagccctatagagcccggccaccagcccagggtcccccaaagattcctcggtcccggatccctgctggtgagcgccccactatctgtggtgaatgtggcaagagcttccggcagagttctgacctggtgaaacaccagcggacacacactggtgagaagccctacaagtgtggcatatgtggcaagggctttggcgacagttccgcccgcatcaagcaccagcggacacaccggggggagcagcccccccgaccagtggtgccccgacggcagccatctcgggcagccacggcagctacccagggaccgaaggcccaggacaagccatatatctgcactgattgcggcaagaggtttgtgctcagctgcagcctcctgagtcaccagcgtagtcacttggggcccaagccctttggctgtgatgtgtgtggaaaggagtttgcccggggatccgacctggtgaagcacctgcgggtgcacacgggtgagaagccctacctctgcccagagtgcggcaaaggtttcgcggacagctccgcccgagtcaaacacctccgcacccacagtggcgagaggccccatgcctgcccggaatgcgaccgtaccttcagcctcagctccacccttcttcgccaccgcctcactcacatggagccccaggacttcagcttcccaggctatcccctacccgctctgatccccagcccacccccacctcctctgggcaccagccccccgctgacacctcgaagtccctcacactcgggtgagccttttggcctgcctggcttggagccagagcctgggggcccacaggctggggagccacccccaccactggcgggcgacaagccccacaagtgccctgagtgtggcaagggcttccgccgaagctctgacctggtgaaacaccatcgtgtgcacacaggggagaaaccctacctctgtcctgaatgcggcaagggttttgctgacagctcagcccgagtcaagcacctccgcacccaccgtggtgaacgggcccggccaccaccaccatccactctgctgcggccacataacccacctggcccagtacccatggcccctcgaccccgagttcgggcccagccttctggacccagccagccccacgtgtgtggcttctgtgggaaggagttcccccggagctcagatctggtcaaacacaggcgtacacacacgggggagaagccatacaagtgtgcagagtgtggcaagggttttggtgacagttctgcccgcatcaagcaccagcgtgggcacctggtcctgacgccctttgggataggggatggtagggcaaggcccctcaagcaggaggcagcaacaggactggaatga

SEQ ID NO: 541 - DNA, 957 bp, Homo Sapiens
atgccgaagcgtgggaaaaagggagcggtggcggaagacggggatgagctcaggacagagccagaggccaagaagagtaagacggccgcaaagaaaaatgacaaagaggcagcaggagagggcccagccctgtatgaggaccccccagatcagaaaacctcacccagtggcaaacctgccacactcaagatctgctcttggaatgtggatgggcttcgagcctggattaagaagaaaggattagattgggtaaaggaagaagccccagatatactgtgccttcaagagaccaaatgttcagagaacaaactaccagctgaacttcaggagctgcctggactctctcatcaatactggtcagctccttcggacaaggaagggtacagtggcgtgggcctgctttcccgccagtgcccactcaaagtttcttacggcataggcgatgaggagcatgatcaggaaggccgggtgattgtggctgaatttgactcgtttgtgctggtaacagcatatgtacctaatgcaggccgaggtctggtacgactggagtaccggcagcgctgggatgaagcctttcgcaagttcctgaagggcctggcttcccgaaagccccttgtgctgtgtggagacctcaatgtggcacatgaagaaattgaccttcgcaaccccaaggggaacaaaaagaatgctggcttcacgccacaagagcgccaaggcttcggggaattactgcaggctgtgccactggctgacagctttaggcacctctaccccaacacaccctatgcctacaccttttggacttatatgatgaatgctcgatccaagaatgttggttggcgccttgattactttttgttgtcccactctctgttacctgcattgtgtgacagcaagatccgttccaaggccctcggcagtgatcactgtcctatcaccctatacctagcactgtga

SEQ ID NO: 542 - DNA, 2256 bp, Homo Sapiens
atggcggccaccgggaccgcggccgccgcagccacgggcaggctcctgcttctgctgctggtggggctcacggcgcctgccttggcgctggccggctacatcgaggctcttgcagccaatgccggaacaggatttgctgttgctgagcctcaaatcgcaatgttttgtgggaagttaaatatgcatgtgaacattcagactgggaaatgggaacctgatccaacaggcaccaagagctgctttgaaacaaaagaagaagttcttcagtactgtcaggagatgtatccagagctacagatcacaaatgtgatggaggcaaaccagcgggttagtattgacaactggtgccggagggacaaaaagcaatgcaagagtcgctttgttacacctttcaagtgtctcgtgggtgaatttgtaagtgatgtcctgctagttccagaaaagtgccagtttttccacaaagagcggatggaggtgtgtgagaatcaccagcactggcacacggtagtcaaagaggcatgtctgactcagggaatgaccttatatagctacggcatgctgctcccatgtggggtagaccagttccatggcactgaatatgtgtgctgccctcagacaaagattattggatctgtgtcaaaagaagaggaagaggaagatgaagaggaagaggaagaggaagatgaagaggaagactatgatgtttataaaagtgaatttcctactgaagcagatctggaagacttcacagaagcagctgtggatgaggatgatgaggatgaggaagaaggggaggaagtggtggaggaccgagattactactatgacaccttcaaaggagatgactacaatgaggagaatcctactgaacccggcagcgacggcaccatgtcagacaaggaaattactcatgatgtcaaagctgtctgctcccaggaggcgatgacggggccctgccgggccgtgatgcctcgttggtacttcgacctctccaagggaaagtgcgtgcgctttatatatggtggctgcggcggcaacaggaacaattttgagtctgaggattattgtatggctgtgtgtaaagcgatgattcctccaactcctctgccaaccaatgatgttgatgtgtatttcgagacctctgcagatgataatgagcatgctcgcttccagaaggctaaggagcagctggagattcggcaccgcaaccgaatggacagggtaaagaaggaatgggaagaggcagagcttcaagctaagaacctccccaaagcagagaggcagactctgattcagcacttccaagccatggttaaagctttagagaaggaagcagccagtgagaagcagcagctggtggagacccacctggcccgagtggaagctatgctgaatgaccgccgtcggatggctctggagaactacctggctgccttgcagtctgacccgccacggcctcatcgcattctccaggccttacggcgttatgtccgtgctgagaacaaagatcgcttacataccatccgtcattaccagcatgtgttggctgttgacccagaaaaggcggcccagatgaaatcccaggtgatgacacatctccacgtgattgaagaaaggaggaaccaaagcctctctctgctctacaaagtaccttatgtagcccaagaaattcaagaggaaattgatgagctccttcaggagcagcgtgcagatatggaccagttcactgcctcaatctcagagacccctgtggacgtccgggtgagctctgaggagagtgaggagatcccaccgttccaccccttccaccccttcccagccctacctgagaacgaaggatctggagtgggagagcaggatgggggactgatcggtgccgaagagaaagtgattaacagtaagaataaagtggatgaaaacatggtcattgacgagactctggatgttaaggaaatgattttcaatgccgagagagttggaggcctcgaggaagagcgggaatccgtgggcccactgcgggaggacttcagtctgagtagcagtgctctcattggcctgctggtcatcgcagtggccattgccacggtcatcgtcatcagcctggtgatgctgaggaagaggcagtatggcaccatcagccacgggatcgtggaggttgatccaatgctcaccccagaagagcgtcacctgaacaagatgcagaaccatggctatgagaaccccacctacaaatacctggagcagatgcagatttag

SEQ ID NO: 543 - DNA, 4509 bp, Homo Sapiens
atggtgcacgtagccaggctgctgctgctgctcctcactttcttcctccgcacggatgctgagacacctccaaggtttacacgaacacccgttgatcagacaggggtctctggcggagttgcctctttcatctgccaagctacgggagacccaagacctaaaattgtctggaacaaaaaaggaaagaaagtcagcaatcagagatttgaggtaatagagtttgacgatgggtctggatcagttctcagaatacaacccttacggactccgagggatgaggccatttatgaatgtgtggcctcaaataatgtgggagaaataagtgtatccaccagactcacagttttgcgggaagatcaaattcccaggggcttccctaccattgacatgggcccacagttgaaggtggttgagcgtactcgcacggccaccatgctttgtgcagccagtggtaatccggatccagaaatcacttggtttaaagatttcttacctgtggacacaagcaacaacaatggtcgtattaagcagttacgatcaggtggtacaccaataagaggagcccttcagattgagcagagtgaagagtctgaccaaggaaaatatgagtgtgttgccaccaacagcgcgggcactcgctattccgctcctgccaatttatatgtcagagagctgcgagaagttcgccgtgtcccaccaagattctctatcccacccactaatcatgaaatcatgccaggcggaagcgttaatatcacctgtgtggccgtggggtcaccaatgccttatgtaaagtggatgttgggggcagaagatctgacacctgaagatgatatgccaataggaagaaatgtgctagaactgaatgatgtaagacagtcagcaaattacacctgtgttgctatgtcaacactgggtgtcattgaagcaatagcacagatcactgtcaaagccttacccaaacctccaggaactcctgtagtgaccgagagcacagctacaagcatcacactgacgtgggactctgggaaccctgagcctgtttcttattacataattcagcataaacctaaaaactctgaggaactttacaaagaaattgatggggtggcgaccacacgctacagtgtcgctggactaagtccctactcggattatgaattcagggttgttgctgtcaataacattgggcgggggcctcccagcgaacctgtgctaacacaaacctcagagcaagcaccatccagtgccccgagggatgtccaggcacgaatgttgagttcgaccaccattttggtacagtggaaggaacctgaagagccaaatggacagatccaaggatatagagtttattatacaatggatcccactcaacatgtcaacaactggatgaaacacaatgtagctgacagccaaatcactactattggcaacttagtgccccagaaaacatattctgtcaaagtcctggcttttacctcaattggagatggtcccctttcaagtgacatacaagtcatcactcagacaggagtaccagggcagccactaaacttcaaagcagaacctgagtctgaaacaagtattttgctctcttggacacctccacgttcagataccattgccaactatgaactggtctacaaagatggggagcatggagaggagcaacgaattaccattgagccagggacatcatataggctgcaaggactgaaaccaaacagcttatactatttccgtctggctgcacgctcccctcaaggcctgggtgcttctactgcagaaatatcagctagaaccatgcagtcaatgtttgcaaaaaattttcatgtcaaagcagtaatgaagacttccgtgttgctgtcttgggagattccagagaattataactccgccatgcctttcaaaattctttatgatgatgggaaaatggtagaagaagtggatggccgagccacacagaagttaattgtcaacctgaagcctgagaaatcatattcatttgtgctgacaaatcgtggaaacagtgctggtgggctgcagcacagggtcacggcaaagactgcaccagatgtattacgtaccaagcctgccttcattgggaagaccaacttggatggcatgattactgtgcaactgcctgaagtacctgcaaatgagaatataaaaggttactacataataattgtgcctttgaagaaatctcgcgggaaatttatcaagccatgggagagtccagatgaaatggaattagatgagctgcttaaggagatatctaggaagcgcagaagcatccgttatgggagagaagttgaattaaagccatatattgccgctcactttgatgtccttcccactgagttcaccctgggggatgacaagcattatggtggatttacaaacaagcaactccaaagtggtcaagaatatgtcttctttgtgttagcagtaatggaacatgcagagtctaagatgtatgcaaccagcccttactccgaccccgtggtgtcaatggatctggatccgcagccaatcacggatgaagaagaaggcttgatctgggttgtaggtcctgtccttgcagtggtctttatcatctgcattgtcattgctattcttctttataaaagtaaacccgacaggaagagggcagagtccgactctagaaaaagcagcataccgaacaataaggagatcccttcacaccacccaacagaccctgtagaactgaggcgccttaactttcaaacaccgggtatggctagccatcctccaatacccatcttggaacttgcagaccacattgaaagattgaaagcaaatgacaacttgaagttttcccaggaatatgagtcaattgaccctggccagcagttcacttgggaacattcaaacttggaagtaaacaaaccaaagaatagatacgcgaatgtaatcgcatatgatcattcccgggttctcctatcagctatagaagggatcccaggaagtgactatgtgaatgccaactacatagatgggtataggaagcaaaatgcctatattgcaacacagggatctctccccgaaacatttggggacttttggagaatgatatgggaacaacggagtgccacagttgtcatgatgacaaaactagaagaaagatcaagggtgaagtgtgaccagtattggcctagcagaggcacagaaacccacggactcgttcaagtaacgctgcttgatactgtggagctggccacatattgtgttcgaacatttgcactttacaagaatggttcaagtgagaagagagaagtgagacaattccagttcaccgcctggcctgatcatggtgttccagaacaccctacaccttttctagctttcttacgtagagtcaaaacctgtaaccctcccgatgctggtccgatggttgtgcactgcagtgcgggagttggccggactggttgcttcatcgtcatagatgccatgttagaaagaataaagcatgaaaaaactgtagatatttatggccatgtaactttaatgagagcccagaggaactatatggttcaaacagaagaccaatacatctttatccatgatgcactgttagaagcagtgacttgtggaaataccgaagtgccagctagaaacttgtatgcctacattcagaagctgacacaaatagaaacgggagagaatgtcacaggaatggagctcgaatttaagcgtctagccagctcaaaagctcacacctcaaggtttatcagtgccaatcttccatgtaataaattcaaaaatcgccttgttaatattatgccatatgaatccacaagggtatgcctgcagcctatccgtggagtagaaggatctgattacatcaatgccagttttattgatggatacagacaacagaaagcctacatcgctacccaggggcccttggcagagaccactgaagacttctggcggatgctctgggaacacaattccaccatagttgtgatgctcaccaagctgcgtgaaatgggcagagagaaatgtcaccaatactggccagcagaacggtctgcaagataccagtactttgttgtagatcccatggctgagtacaacatgccacagtatatcctaagggaattcaaggtcacagatgccagggacggccagtcccgaacagtaaggcagttccagttcactgactggccagagcaaggagtgccaaagtccggagaaggatttattgacttcatcggccaagtccataaaacaaaagaacagtttggccaagatggacccatttcagtccattgcagcgcgggcgttggaagaactggagtcttcataacgctaagcattgttttggaaagaatgagatatgaaggagttgtagatatcttccagactgtcaaaatgttaagaacacaacgaccagctatggtacagacagaggatcaatatcagttttcctatcgtgccgcactagagtacctgggcagctttgaccactatgcaacgtag

SEQ ID NO: 544 - DNA, 3444 bp, Homo Sapiens
atggacattcggaaattctttggagtaataccaagtggaaagaaacttgtaagtgaaacagtaaagaagaatgagaaaacaaagtctgatgaagaaactttaaaagcaaagaaaggaataaaggaaatcaaggtaaatagctcccgtaaagaggatgacttcaaacaaaagcaaccaagcaagaaaaagaggatcatctatgattcagattcagagtcagaggagacgttgcaggtaaaaaatgccaaaaagccaccagaaaaactgccagtatcttctaaacctggtaaaatttcacggcaggatcctgttacatacatttcagaaacagatgaagaagatgactttatgtgtaagaaggcggcctctaaatcaaaagagaatggaagatctacaaatagtcatcttggaacatcaaacatgaaaaagaatgaagaaaacactaagaccaagaataagcctttatcaccaataaaacttacacccacatcagtacttgattattttggaactggaagtgtccaaagatctaataagaagatggtggcaagcaaaagaaaagagctttcacaaaatacagatgagtctggattaaatgatgaagccatcgccaagcaattacagcttgatgaagatgcggagctggagaggcagttgcatgaagatgaagagtttgccagaacattagccatgttggatgaagaacccaagaccaaaaaggctcgaaaggacacagaagcgggagaaacgttttcatctgtccaagccaatttaagtaaagcagaaaaacataaatatcctcataaagtaaaaacagcacaagtttcagatgaaagaaagagctacagtcctaggaagcaaagtaaatatgaaagttcaaaagaatctcagcaacattccaagtcatcagctgacaaaataggagaagtctcttctcccaaggccagttctaagctggcaattatgaaaagaaaagaagagagctcttataaagaaatagagcctgtggcctcaaaaagaaaagaaaatgccattaaattgaaaggagagacaaaaactcctaagaaaaccaaaagttctccagctaaaaaagagtctgtaagtcctgaagattctgaaaagaaacgcactaattatcaagcttatcgaagctacttaaatcgagaaggtcccaaggctctgggctccaaagaaataccaaagggagctgaaaattgcttggaaggccttatatttgtaatcacaggcgtgctggagtctattgaacgagatgaggccaagtctctaattgaacgttatgggggaaaagtaacaggaaatgtcagcaagaaaacaaattatcttgtcatgggtcgtgatagtggacagtccaagagtgataaggccgcagccttggggacaaaaattattgatgaagatggcctgttgaatctgattcggactatgccaggcaagaaatccaagtatgaaatagcagttgaaactgagatgaagaaagagtccaaactggagagaacaccccaaaaaaatgtccaaggaaaaagaaaaattagtccatctaaaaaggaatcagaatctaaaaagagcaggccgacttccaaaagggacagtttggcaaagacaataaaaaaggaaacagatgtgttttggaaaagcctggatttcaaggagcaggtggctgaggagacaagtggtgacagcaaggctaggaatttggctgatgacagcagtgaaaacaaagtggaaaatttgctctgggtggataaatataagccaacctcgctcaagaccataattggacagcaaggtgaccagagctgtgccaacaaactcctacgctggctccgaaactggcaaaagagttcttccgaagataaaaaacacgcaaagtttggtaaattttccggcaaagatgatggctctagttttaaagcagcgttgctgtcaggccctcctggtgttggcaaaaccaccacagcttccctggtgtgtcaggagttgggatacagctacgtggaactgaatgcaagtgacacccggagtaagagcagtttgaaggcgattgttgctgagtcactgaacaataccagcatcaaaggcttttattcaaatggagcagcctcttcagtaagcacgaaacatgctctcatcatggatgaagtagatggcatggcaggcaatgaggataggggaggaattcaggaattaattggcctgataaaacatactaaaattcccattatttgtatgtgcaatgatagaaatcatcccaagattcgctctctggttcattattgttttgatcttcgttttcaaagacctcgggttgaacagattaagggtgctatgatgtctattgcatttaaagaaggtttaaagattccccctccagctatgaatgaaataattttgggagccaatcaagatatcagacaggttttacataatctgagtatgtggtgtgcacgaagtaaagcattaacctatgaccaggccaaagctgattctcacagagccaaaaaggatatcaaaatgggcccatttgatgttgcccggaaagtgtttgcagctggagaggagactgctcacatgtcacttgtggacaagtcagatctcttttttcatgattattcaatagcacccctcttcgtccaggaaaattacatacacgtgaagcctgtagcagcagggggtgacatgaaaaagcacctgatgcttttaagcagagcagcagacagcatatgcgatggtgacctagtggacagccagatccggagtaagcaaaactggagtcttctgcctgcgcaggccatttatgccagtgttcttcctggagagttgatgagggggtacatgacccagtttcccaccttcccaagctggctggggaagcactcgtctacaggcaaacatgatcgtattgttcaggacctggccttgcatatgagtctcagaacttactccagcaaaaggactgtaaacatggattatctgtcgcttctaagggatgcacttgtacagcccttgacctcacaaggagtagacggagtacaggatgttgttgcacttatggacacatattatttgatgaaagaagactttgagaatatcatggaaatcagcagctggggtggcaaacctagtcccttttcaaagctggatcccaaggtgaaagcagccttcacaagagcttacaataaggaagcccaccttactccatactcacttcaagctataaaggcatctagacacagcacaagcccatccctggattcggaatacaatgaagaattaaatgaagatgactctcaatctgatgagaaagaccaagatgctatagaaactgatgccatgatcaagaaaaagacaaaatcttcaaagccttcaaaaccagaaaaagataaggagcccagaaaaggaaaaggaaaaagttcgaagaaatga

SEQ ID NO: 545 - DNA, 1083 bp, Homo Sapiens
atgctgggctctggatttaaagctgagcgcttaagagtgaatttgagattagtcataaatcgccttaaactattggagaaaaagaaaacggaactggcccagaaagcaaggaaggagattgctgactatctggctgctgggaaagatgaacgagctcggatccgtgtggagcacattatccgggaagactacctcgtggaggccatggagatcctggagctgtactgtgacctgctgctggctcggtttggccttatccagtctatgaaggaactagattctggtctggctgaatctgtgtctacattgatctgggctgctcctcgactccagtcagaagtggctgagttgaaaatagttgctgatcagctctgtgccaagtatagcaaggaatatggcaagctatgtaggaccaaccagattggaactgtgaatgacaggctaatgcacaagctgagtgtggaagccccacccaaaatcctggtggagagatacctgattgaaattgcaaagaattacaacgtaccctatgaacctgactctgtggtcatggcagaagctcctcctggggtagagacagatcttattgatgttggattcacagatgatgtgaagaaaggaggccctggaagaggagggagtggtggcttcacagcaccagttggtggacctgatggaacggtgccaatgcccatgcccatgcccatgcctatgccatctgcaaatacgcctttctcatatccactgccaaagggaccatcagatttcaatggactgccaatggggacttatcaggcctttcccaatattcatccacctcagataccagcaactcccccatcgtatgaatctatgacattaatgctgataagaatatctcttctgcacagattgttggtcctggacccaagccagaagcctctgcaaagcttccttccagacctgcagataactatgacaactttgtcctaccagagttgccatctgtgccagacacactaccaactgcatctgctggtgccagcacctcagcatctgaagacattgactttgatgatctttcccggaggtttgaagagctga

SEQ ID NO: 546 - DNA, 1083 bp, Homo Sapiens
atgatggcgggcgtgaagtgccgcctggacagtagcctgccccccgtgcgacgcctgggcatgatcgtggcagaggtcgttagtgcccggatccaccccgaggggcctcccctgaaattccagtacgaagaggatgaactgagcctcgagctgctggccttggcctccccccagcctgcgggtgacggcgcctcggaggcgggcacgtccctcgttccagccacggcagagccccctgcagagacccccgcagagatcgtggatggcggcgtcccccaagcacagctggcgggctctgactcggacctggacagcgatgatgagtttgtcccccacgacatgtcgggggacagagagctgaagagcagcaaggctcctgcctacgtccgggactgcgtggaagccctggatgtgctgactctggctgcccaggagctgtctaggcctgggtgcctcgggaggactccccaacctggctccccaagtcccaacaccccgtgcctgccagaggcagccgtctctcagcctggcagtgccgtggcgtctgactggcgggtggtggtggaggagcggatcagaagcaagacccagcggctctccaagggtggcccgaggcagggcccggcaggcagccccagcagattcaactccgtggccggccacttcttcttccccctccttcagcgctttgacaggcctctggtgaccttcgacctcttgggagaagaccagctggttctcggaaggctggcgcacaccttaggggccctgatgtgcctggctgttaacaccacggtggctgtggccatgggcaaggccctgctggaattcgtgtgggcccttcgcttccacatcgatgcctacgtgcgccaggggctgttgtcggccgtctcctccgtcctgctcagcctgcctgctgcgcgcctgctggaggacctgatggacgagctgctggaagcccggtcctggctggcggacgtggccgagaaagacccggacgaggactgcaggacgctggcactgagggccctgctgcttctgcagagactcaagaacaggctcctcccacccgcgtctccctag

SEQ ID NO: 547 - DNA, 759 bp, Homo Sapiens
atgcaactgactcgctgctgcttcgtgttcctggtgcagggtagcctctatctggtcatctgtggccaggatgatggtcctcccggctcagaggaccctgagcgtgatgaccacgagggccagccccggccccgggtgcctcggaagcggggccacatctcacctaagtcccgccccatggccaattccactctcctagggctgctggccccgcctggggaggcttggggcattcttgggcagccccccaaccgcccgaaccacagccccccaccctcagccaaggtgaagaaaatctttggctggggcgacttctactccaacatcaagacggtggccctgaacctgctcgtcacagggaagattgtggaccatggcaatgggaccttcagcgtccacttccaacacaatgccacaggccagggaaacatctccatcagcctcgtgccccccagtaaagctgtagagttccaccaggaacagcagatcttcatcgaagccaaggcctccaaaatcttcaactgccggatggagtgggagaaggtagaacggggccgccggacctcgctttgcacccacgacccagccaagatctgctcccgagaccacgctcagagctcagccacctggagctgctcccagcccttcaaagtcgtctgtgtctacatcgccttctacagcacggactatcggctggtccagaaggtgtgcccagattacaactaccatagtgataccccctactacccatctgggtga

SEQ ID NO: 548 - DNA, 2673 bp, Homo Sapiens
atggattccgaaagacaagtcaaggacactgatgacattgaaagtcctaaacgcagtatccgagacagtggctacatcgactgctgggattccgagcgcagcgactccctctctcctcctcgccacggcagagatgattccttcgacagcctggattcctttggctctcgctctcggcagacgccttcaccagatgtagtcctcaggggaagcagcgatgggagaggaagcgactctgaatccgacttgcctcatcggaagctgccagatgtgaagaaggatgacatgtctgcacggcggacttcccatggtgagccgaaatcagcagtgccttttaaccagtacctcccgaacaaaagcaatcagacggcctacgtccccgcgcctctgagaaagaagaaagcagagagagaggaataccgcaagagctggagtaccgccacctccccgctgggtggggagaggcccttcaggagcaccagcatgtttgacatgcggtgtgaggaggaggccgcggtgcagccgcacagcagggcccgccaggagcagctgcagctgataaataaccagctgagggaagaggacgacaaatggcaagatgacctggctcgttggaagagtcgtagaagaagtgtttctcaggacttaatcaagaaagaggaagaaaggaaaaaaatggagaagttactggctggagaagatgggacaagtgaacgaaggaaaagcatcaaaacctacagagaaattgttcaagaaaaagagcggagagagagagagctgcatgaagcatataagaacgctcggtcccaggaggaggcagaggggatccttcaacagtacattgagaggttcaccatcagtgaggctgttctcgaacgcttggagatgccaaaaattctggaaagaagccattcaacagagccaaatttatcctccttcctgaatgaccccaatcccatgaaatacctgcggcaacagtcactgcctccacccaaattcactgccactgttgaaaccaccattgctcgtgccagtgttctggataccagcatgtcagcaggcagtgggtctccaagcaaaactgtcactcccaaagcagtgcctatgctgacacccaagccttactcccagcccaaaaattctcaagatgttctgaagacctttaaggtagacgggaaagtcagtgtgaatggagagacggttcatagagaggaggagaaggaaagagagtgtcccacggtggcacctgcccactccttaaccaaatcccagatgtttgaaggtgtggccagagtgcacgggtctccactggagctgaaacaagacaacggtagcatcgagatcaacataaagaagccaaactctgttccccaagagctcgcagcaaccactgagaaaacggaaccgaatagtcaagaggacaagaatgatggtggaaaatcaagaaaagggaatatagaacttgcctcatcagaaccacagcattttacaacaactgtgactcgatgcagcccgaccgtggcctttgtggaatttccctccagcccccagctgaagaatgatgtgtcggaagaaaaagaccagaagaaaccagaaaatgaaatgagtggaaaggtggagttggtgctgtcacaaaaggtggtaaagccaaaatctccagaacccgaagcaacgctgacatttccatttctggacaaaatgcctgaagccaaccaactacatttgccaaatctcaattctcaagtggattctccaagcagtgagaagtcacctgttatgacaccttttaagttctgggcatgggacccagaagaggagcgcaggcgacaggaaaaatggcaacaggaacaggaacgtttgctccaggagagataccagaaggagcaggacaagctgaaagaagagtgggaaaaggcccaaaaggaggtggaagaggaagaacgcagatactatgaggaggagcgtaagataattgaagacactgtggttccatttactgtttcttcaagttccgctgaccagctgtctacctcttcctccatgactgaaggcagtgggacaatgaataagatagacctgggaaactgtcaagatgaaaaacaagacagaagatggaagaaatcattccagggagatgacagtgacttattgctgaagactagggaaagtgatcgactggaggagaagggcagcctaactgaaggggccttggctcattctgggaaccctgtatcaaaaggagtccatgaagaccatcagctggataccgaggctggggccccacactgtggaacaaacccacagcttgctcaggatccatcccagaatcagcagacatcaaatccaacgcacagttcagaagatgtgaagccaaaaaccctcccgctggataaaagcattaaccatcagatcgagtctcccagtgaaaggcggaagtctataagtggaaagaagctgtgctcttcctgtgggcttcctttgggtaaaggagctgcaatgatcatcgagaccctcaatctctattttcacatccagtgtttcaggtgtggaatttgtaaaggccagcttggagatgcagtgagtgggacggatgttaggattcgaaatggtctcctgaactgtaatgattgctacatgcgatccagaagtgccgggcagcctacaacattgtga

SEQ ID NO: 549 - DNA, 4134 bp, Homo Sapiens
atggacgctctcaataggaaccaaataggccctggatgccagacccagaccatggtgcagaaaggacccttggacctgatcgagacaggcaaagggctgaaagtgcaaacggacaaaccccacctggtgagcctgggcagtgggcgactcagcacagccatcaccctcctgccgctggaggaagggaggacggtgattggctctgcagccagagacatctcactacagggcccaggcctggctccagagcactgctacatcgagaacctgcggggcaccctcaccctctacccctgtggcaatgcctgcactattgatgggctccctgtccggcagcctacccggctcactcagggctgcatgttgtgcctgggtcagtccaccttccttcgctttaaccacccggctgaagccaagtggatgaaaagcatgattccagcagggggccgagcccctgggcccccctacagccctgttcctgcagaatcagaaagtctggtaaatgggaaccacaccccacagactgcaacacggggaccctctgcctgtgccagccacagttccctggtgagctctattgagaaggacctgcaagagatcatggactcactggtgctagaggagcctggagctgctggcaagaagcctgccgcaacctctccactgtcaccgatggctaatggtgggcgctacctgctgtctcccccaaccagccccggcgccatgtctgtgggctccagctatgagaacacctctccagccttctctccactctcttcaccagccagcagtggaagctgtgccagtcactcacccagtgggcaagagccaggaccttctgtgcccccgctggtacctgcccgttcctccagctaccatctggccctacagcccccacagtcccgcccaagtggtgctcgctccgagagtcctcggctgagcaggaaagggggccatgagaggcctcccagccctggcctccggggtctgctgacagacagccctgcagctactgtcttggcggaggcccggagagccactgagagcccccggctgggtgggcagctgcctgtggtggccatcagcctgagtgaatacccagcttctggtgctctcagtcaacccaccagcattcctggcagccccaagtttcagcctccagtccctgctccccgaaacaagattggcacactccaggaccgccctcccagccctttccgtgagcctccaggcagtgagcgggtgctaacaaccagcccctcacgccaactggtgggccgaacattttcagatgggttagccacccgtaccctgcagcctcctgagagtccccgcctgggccggcggggcctggacagtatgcgagaactaccccccttaagtccatctctgtcccggcgagctctctccccgctgcccacccggaccaccccagatcccaagctaaacagggaagtggcagagagtcctcggccccggcgctgggcagcccatggggcttcaccagaggacttctccctgacgctgggggcacggggccgtaggacacggagcccctcacccacactgggtgagtctctggcaccccacaagggcagcttcagtggcaggctgagcccagcctacagtctgggctctcttactggggcttcaccctgccagagtccctgtgtccagaggaagctctccagcggggacttgcgggtgcctgtcacaagggagcggaaaaatagcatcacagagatcagtgacaatgaggacgacctcctggagtaccaccggcgacagcgccaagagcggctccgggagcaggagatggagaggctggaacgccagcgcctggagaccatcctgaacctgtgtgccgaatacagccgggctgatgggggacctgaggctggggagcttcccagcattggggaggccaccgcagcattggcactggcaggccggaggccctcacgaggccttgcaggggcctctgggcggagcagcgaggagcctggcgttgccacccaacgcctatgggagagtatggagcgctcagatgaggaaaatctcaaggaggagtgcagcagcactgagagcacccagcaggagcacgaagatgcacctagcaccaagctccagggagaggtgctagccctggaagaagagcgggctcaggtgctggggcacgtggagcagctcaaggtccgtgtgaaggagctagagcagcagctgcaggagtcagcccgagaggccgaaatggagcgggcactgctgcagggagagagggaggcagagcgggcactgctgcagaaggagcagaaggcagtggatcagctgcaggagaagctggtggccttggagacaggcatccagaaggagagggacaaggaggcagaggccctggagactgagacaaagctctttgaggacttggagttccagcagttggagcgggagagccgcgtggaggaggagcgcgagctggccggccaggggctgctccggagcaaggctgagctgctccgcagcatcgccaagaggaaggagcgcctggccatcctggacagtcaggctgggcagatccgggctcaggccgtgcaggaatcagaacgcctggcccgggacaagaatgcctccttacagctgctgcaaaaggagaaggagaagctgactgtgctggaaaggagataccactcactcacagggggcaggcctttcccgaagaccacatcgaccctcaaagagatggagaagctgctgctccctgctgtagacttagagcagtggtaccaggagctgatggccgggctggggactggccccgctgcagcctcccctcactcttctcccccgcctctgcccgccaaagcttcccgtcagctgcaggtttaccgctccaagatggatggcgaggccaccagcccccttccccggacccgcagcggccccctcccctcctcctctggctcttcctcctcctcctcccagctcagcgtggctaccctggggcgtagcccctccccaaagagcgctctactcacccagaatggcacgggcagccttcctcgcaacctggcagccacactgcaggacatcgagaccaagcgccaactagctctgcagcagaagggacaacaagtgattgaagagcagcggcggcgactggctgagctgaagcagaaagcggcagctgaggcacagtgccagtgggatgcccttcacggggcagcacccttcccagcgggcccctcgggcttcccccctctcatgcaccactctatcctacaccacctgcctgcggggcgggagcgtggggaggagggtgagcacgcctatgatacgctgagtctggagagctctgacagcatggagaccagcatctccaccgggggcaactcggcctgctcccctgacaacatgtccagcgcgagtggtctggacatggggaagatcgaggagatggagaagatgctgaaagaggctcatgcagagaagaaccggctcatggagtcgagggagcgggagatggagctgcggcggcaggccctggaggaggagcggcggaggcgtgagcaggtagaacggaggctgcagagtgagagtgcccggaggcagcagctggtcgagaaggaggtcaagatgcgggagaaacaattttcccaggcacgacccctgacccgctacctgccaatccggaaggaggactttgacctgaagacacatattgagtcatcgggccatggtgttgatacctgcctgcacgtggtgctcagcagcaaggtctgccgtggctacttggtcaagatgggcggcaagattaaatcatggaagaagcgctggtttgtcttcgaccggctcaagcgcaccctttcctattatgtggacaagcatgagacgaagctgaagggagtcatctatttccaggccattgaggaagtgtactacgaccacctgcgcagtgcagccaagaagaggtttttccgcttcactatggtgactgagagcccgaacccagccctcaccttctgcgtaaagacccatgaccggctgtactacatggtggccccatctgcagaggccatgcgtatctggatggatgtcattgtcacaggggctgagggctacactcagttcatgaactaa

SEQ ID NO: 550 - DNA, 5652 bp, Homo Sapiens
atggggaagcgggcgggaggaggagcaaccggagccaccaccgccgccgtctccacgtccgccggggccgggctggaacctgcggccgcccgtagcgggggcccgcggagcgcggccgccggcctcctaggcgcgctgcacctggtgatgaccctcgtagtggctgcggcgcgggccgagaaggaagcattcgttcagtcagagagcataatagaagtactgcgttttgatgatggagggctactacagaccgagacaacacttggactcagttcatatcagcagaaaagtatatctctctaccgggggaattgcaggcccatacgatttgagccaccaatgctggatttccatgaacaaccagttggaatgccaaaaatggaaaaagtctacttacataatcctagttctgaagaaacgattactttagtatcaatatctgctacaacatcacattttcatgcatcattttttcaaaataggaaaattcttccaggaggaaatacatcatttgatgtagtttttcttgcaagagtagtaggaaatgtagaaaatactttatttattaatacatctaatcatggggtatttacttaccaggtatttggtgttggagttccaaatccatatcgattgaggccgttccttggggccagagtccctgtgaatagcagtttctcacctataataaacatccacaatcctcacagtgagcctttacaggttgtagaaatgtactctagtggaggagaccttcacctagaactcccaacgggtcaacaaggaggtaccagaaaactgtgggaaattcctccttatgaaaccaagggagtgatgagagccagtttttcatctagagaagcagataatcacacagccttcataagaataaagactaatgcttcagacagcacagagtttatcattcttcctgttgaggttgaagttacaacagctcctggaatttattcctcaactgaaatgttagattttggtacactaagaacacaagatctaccaaaagttttaaaccttcatttattaaattcaggaacaaaagatgtaccaataacaagtgttcgacctacaccacaaaatgatgctataacggtacactttaaaccaattacattaaaagcatcagaaagtaaatacaccaaggttgcaagcattagttttgatgcatcgaaggcaaaaaagccatctcagttttctgggaaaataacagttaaagcaaaggaaaagagttattctaaacttgaaataccatatcaagcagaagttttagatggttatttgggatttgatcatgctgcaacattatttcacatccgagacagccctgctgatcctgtggaaaggccaatttaccttactaacactttcagttttgcgatcctcattcacgatgtgttgctaccagaagaagccaaaacaatgtttaaagttcacaacttcagcaaaccagtcttaattcttcctaatgaatcaggatacatttttaccctgctttttatgccttccacatcatccatgcacattgataacaacattttacttattaccaatgcttctaaatttcatttacccgtgcgggtatacacaggctttttagattactttgtattgccccccaaaatagaggaacgtttcatagattttggagtactgagtgctacagaagcaagtaatattttatttgcaattataaacagcaatccaattgagttggctataaaaagttggcatatcataggagacggtttatcaatagaacttgtagctgtggaaagaggcaatagaactacaataatttcaagcctgccagagtttgaaaaatcctctttatcagatcaatcatcggtaacattagcttcaggctattttgcagtcttcagagtcaaacttactgcaaaaaaattagaggggattcatgatggagccatccagatcacaacagactatgagatcctgacaatccctgtgaaggctgtgattgcagtaggctcactgacctgcttccctaagcacgtggttcttccaccttcctttccagggaaaatagttcatcaaagtttaaatattatgaattccttctcacagaaggtaaaaatacagcaaatacgatctttgtcagaagatgtgcgattttactataaacgattacggggcaataaggaagacttggagccaggaaaaaaatcaaagattgcaaacatttattttgatcctggactacagtgtggggatcattgctatgttggcttgccttttctatccaaatctgaacccaaagtgcagcctggtgtagccatgcaggaagatatgtgggatgctgactgggatttgcatcaaagcctgttcaagggatggacaggaataaaggaaaattcaggtcatagattgagtgctatatttgaagtaaatacagaccttcaaaaaaatataatatcaaaaatcactgctgagctctcctggccttccatacttagctcaccccggcacttgaaatttccacttactaatacaaactgctcctcagaagaagagattactttagaaaatcctgcagatgttcctgtctatgttcagtttattcctctggctttatattccaacccttcagtgtttgtagataagttagtatcaaggtttaacttgagtaaggtggcaaagatagatttgagaacactagaatttcaagtcttcagaaacagtgctcatccactgcagagttcaacaggatttatggagggcctctctcgacatttaattttaaacctaattttaaaacctggagaaaagaaatctgtcaaagtaaagtttactccagttcacaacagaactgtttcttcacttatcatagtcagaaataacctgactgtgatggatgctgtgatggtccaaggacaaggaacaactgagaacttgagggtggcaggcaagcttccaggtccaggaagctccttacgctttaaaatcacggaagcattgttaaaagattgtacagatagtttaaaactaagagaaccaaatttcacattgaaaagaacatttaaggtagagaatacaggacaacttcaaattcacatagaaaccattgaaatcagtggatactcatgtgaaggatatggctttaaagttgttaattgtcaagagtttactctaagtgccaatgcttctagagatataatcatattgtttactcctgattttacagcttctagagttattcgggaactgaagtttataacaaccagtggctctgagtttgtatttatattgaatgcatcccttccttaccatatgttagcaacctgtgcagaagccctacccagacctaactgggaactggctctgtatatcatcatctcaggaataatgagtgcactgtttcttttggtcattggaacagcctatttggaagctcaaggaatatgggagccatttcgaaggcggctatcctttgaggcctcgaacccgcccttcgatgtgggaaggccatttgatctcaggagaatcgttggtatttcatctgaaggaaacttgaacacactcagctgtgaccccggtcacagtagggggttctgtggagcaggcggttcatcatcccgacccagtgccgggagtcataagcagtgtggcccatcggtccacccacacagcagtcacagcaatagaaactcagctgacgtggaaaacgtcagagccaaaaacagttcaagtacctctagtaggacttctgctcaagcagcttcttcacagtctgctaacaaaacaagcccccttgtcttagattcgaacacagtgactcaaggtcatacagcgggcagaaagtccaaaggggcaaagcagagccagcacggcagccagcaccatgcccacagcccgctggagcagcaccctcagcctcctctgccaccgccagtgcctcagccccaggagccgcagcctgaaaggctgtctcccgcccccctcgcacacccttcccacccagaacgtgccagcagcgcgaggcacagttccgaggactcggacatcaccagtctcatagaagccatggacaaagacttcgaccaccatgactccccagccctagaagtgtttacagagcagcctccatcgccattgccaaaaagcaaagggaaaggaaaacctcttcagcgcaaggtgaaaccacctaagaagcaagaggaaaaggagaagaagggaaagggaaagccacaggaagatgagctgaaggactctttggctgatgatgatagctcctccaccaccacagagacctccaaccctgacacagaaccgctcctcaaggaggatacagaaaagcaaaagggaaaacaagccatgcctgaaaaacatgaaagtgaaatgtctcaagtgaagcaaaaaagcaaaaaactcttaaatattaagaaagaaatcccaacagatgtgaaacccagttcattagaactaccatatactccccctttggaaagtaagcaacgtagaaatctcccaagcaagattcctcttccaactgcaatgacaagtggatccaaatcacgaaatgcccagaaaacaaaaggtacaagtaagttagtggataacagaccacctgccctagcaaaattcctcccgaatagtcaagaattaggcaacaccagtagctcagagggtgaaaaagactctcctccaccggagtgggattccgttccagttcacaaacctggcagctctactgatagtctttataaactttctctgcaaaccctcaacgcagacattttcttaaaacaacgccagacctcaccgacacctgcttccccgtctcccccagctgccccctgcccctttgtggcccggggcagctacagcagcatcgtcaacagcagctccagcagtgaccctaaaataaaacagccaaatggaagcaaacacaagttgacaaaggcagcctcgctcccgggcaagaacggcaaccccacttttgctgcagtcacggctggctacgacaagagcccaggtgggaatggctttgctaaagtttcttcaaacaaaacaggtttctccagcagccttggcatttcacacgctcctgttgacagcgatggctcagacagctcgggtttgtggagtcccgtcagcaacccaagcagccctgacttcactcccctcaattcgttctccgcctttggaaactcttttaatctaactggtgaagttttcagcaaactcggattatctcgatcgtgcaatcaggcctcacagaggagctggaacgagtttaatagtggcccttcatacctttgggagtcgccagcgacagatcccagtccttcctggccagccagttccggctccccgacccacacagccacatcggtcctcggtaacaccagcggcctgtggtccaccactccattcagcagctccatttggtccagcaaccttagcagcgcccttcccttcaccactccagcaaacacgctggcaagcatcggcctcatgggcacagaaaactcccctgctcctcacgctccctccacctccagtccagctgacgacttgggacagacctacaacccgtggcggatatggagccccacgattggaagaagaagctcggacccttggtctaattcgcactttcctcacgagaattaa

SEQ ID NO: 551 - DNA, 375 bp, Homo Sapiens
atgtcctacatcccgggccagccggtcaccgccgtggtgcaaagagttgaaattcacaagctgcgtcaaggtgagaacttaatcctgggtttcagcattggaggtggaatcgaccaggatccttcccagaatcccttctctgaagacaagacggacaagggtatttatgtcacacgggtgtctgaaggaggccctgctgaaatcgctgggctgcagattggagacaagatcatgcaggtgaacggctgggacatgaccatggtcacacacgaccaggcccgcaagcggctcaccaagcgctcggaggaggtggtgcgtctgctggtgacgcggcagtcgctgcagaaggccgtgcagcagtccatgctgtcctag

SEQ ID NO: 552 - DNA, 953 bp, Homo Sapiens
gaaggatggaagaaaattcctctggcaataccatgtcagcctcttcgatgtttaatacagaagaaagaaaatgtttgcagactcacagagtcacggtgcatggggtcccagggccagagccctttaccgttttcactattaatggaggcaccaaggcaaagcagcttctgcagcaaattctgacaaatgaacaagacatcaaacctgttaccacagactattttttgatggaagaaaaatattttatatctaaagaaaagaatgaatgtaggaaacaaccattccagagagccattggtccagaagaggagatcatgcaaattttaagcagctggtttccagaagagggatacatgggcaggattgtcttaaaaacccagcaggaaaacctagaagagaaaaacattgttcaagatgacaaagaggtgatcttgagctcagaggaggagagtttctttgtccaagtgcatgatgtttctccagagcaacctcgaacagtcatcaaagcaccccgcgtcagcactgcacaggatgtcattcagcagaccttatgcaaagccaaatattcctacagcatcctgagcaaccccaatccaagcgactatgtgcttttggaagaggtggtgaaagacactaccaacaagaagactaccacaccaaagtcctctcagcgggtccttctggatcaggagtgtgtgtttcaagcccaaagcaagtggaaaggtgcaggaaaattcatccttaagctaaaggagcaggtgcaggcatctcgagaagataaaaagaaaggcatttctttcgcaagtgaactcaagaagctcaccaagtcaactaaacagccccgaggacttacatcaccttctcagctcttgacctcagaaagtatccaaaccaaggaggagaaacctgtgggtggcttgtcctccagtgacacaatggattaccgacagtga

SEQ ID NO: 553 - DNA, 3699 bp, Homo Sapiens
atggccgaggccgcctccggcgccgggggcacgtccctggagggcgagcgtggcaagaggcccccgccggagggcgagcctgcagccccggcgtccggagttctggataagcttttcggaaagcggctcctgcaggctggtcgctacctggtgtcccacaaggcgtggatgaagacggtgcctacagagaactgcgacgtgctgatgaccttcccagacacgaccgatgaccacacgctgctatggctgctgaaccacatccgcgtgggcattcccgagctcatcgtgcaagtccgccaccaccgccacacgcgtgcctacgccttctttgtcaccgccacgtatgagagcctactccgaggggccgacgagctgggtctgcgcaaagcagtgaaggccgagtttggcgggggcacccgcggcttctcctgcgaggaggactttatctatgagaatgtggagagcgagctacgcttcttcacctcccaggaacgccagagcatcatccgcttctggctgcagaatttgcgtgccaagcagggagaagcactccacaacgtgcgcttcctggaggaccagccaatcatcccggagctggcagcacgtgggatcatccagcaggtgttccctgtccacgagcagcgtattctgaaccgcctcatgaagtcatgggtgcaggccgtgtgtgaaaaccagcctctagatgacatctgtgattactttggtgtgaaaattgccatgtacttcgcctggctgggcttctacacgtcggctatggtatacccagctgtcttcgggtctgtcctgtacacattcacagaggctgatcagacaagccgggatgtttcctgcgtggtctttgccctcttcaacgtgatctggtcgacgctgttcctagaggaatggaagcggagaggggctgagctggcatataagtgggggacgctggactcacctggggaagccgtggaggagccacgcccccagttcaggggcgtgcgacgtatcagccccatcacgcgggccgaggagttctactacccgccctggaagcggctgctcttccagctgcttgtgagcctccccctgtgcctggcgtgcctcgtctgtgtcttcttgctcatgcttggctgcttccagctgcaggagctggtgctgagcgtgaaggggttgccccgtctcgcccgattcctgcctaaggtcatgctggccctgcttgtcagtgtgagtgccgagggctacaagaagctagccatctggctcaatgacatggaaaattaccggctggagagcgcctatgagaagcacctcatcatcaaagttgtcctgttccagtttgtcaactcgtacctgagcctcttctacatcggtttctacctcaaggacatggagcgcttgaaagagatgctggccacgctgctgatcacccgccagttcctccagaacgtgcgcgaggtcctgcagccgcacctgtaccggcgcctgggccgcggcgagctgggcctgcgggccgtctgggagctggcccgagccctgcttggcctcctgagcctccggcgccctgcgccccgccgcctcgaaccccaggcggatgagggcgggggcggcggcagcgggggcgggggccgcaggtgcctcagcgggggctgcggggcgccggaggaggaggaggaggcggcgctggtggagcggcggcgggcgggggaaggcggggaggagggggacgggcctccagggggcaaggaggaggacgaggacgacgaggaggaggaggacgaggaggaagaggaggacgaggaggagggcgaggaagggggcctcctggactgcgggctccggctgaagaaggtcagcttcgctgagcgcggcgcggggcggcgtcggcccggcccaagcccggaggccctcctggaggaagggagccccactatggtggagaaggggctggagccgggagtgttcaccctggccgaggaggacgacgaggcggagggggctcccggcagccctgaacgggagcccccggccatcttgttccgccgggccgggggcgagggccgagaccaggggcccgacgggggcccggacccggaacccggctccaacagcgattcgacccgtaggcagagacggcagaaccggtcgtcttggattgacccgccggaggaggaacactcgccccagctcacccaggcagagctggagagctgtatgaagaagtacgaggacacgttccaggactaccaggagatgttcgtgcagttcggctacgttgtgctcttctcgtccgccttccccctggcggcgctgtgcgccctggtcaacaacctcattgagatccgcagcgacgccttcaagctgtgcaccgggctgcagcggcccttcggccagcgcgtggaaagcatcggccagtggcagaaggtgatggaggccatgggtgtcctagcgattgtggtcaactgctacttaatcggccagtgcgggcagctgcagcgcctcttcccctggctgagcccggaggcagccatcgtgtcggtggtagtgctcgagcacttcgctctgctcctcaagtacctcatccacgtggccatccccgatatcccgggctgggtggccgaggaaatggccaagctggagtaccagcgccgcgaggcctttaagagacacgagcgccaggcccagcatcgctaccagcagcagcagcgcaggcggcgggaggaggaggagcgacagcgccatgcagagcaccatgcccggcgggagcatgattctggtggccgagaggaggcgagggccgagggctctgggctggaccctgccacctcctccgagaaggcctctgccaaggccaagggcagcactgcgggtggccacgggcctgaacggcccaagcgcccagggtccctgctggcacccaacaacgtcatgaagttgaagcagatcatcccactgcagggcaaattcctctcgtcaggggccacatcctcactggctgctgcaggggccggagccaccacccggcctccccctgcccagtcacccacaggcagcgacacccgcctgcctgccttcctcagcttcaagttcctcaagtcacccgagacccggcgggactctgagcgcagccactcaccgcccaaagccttccatgctggcaagctcttcccctttggtggcacccgggctgagcctgggtccaacggggcgggcgggcaggcccggccagatgggacccccagcagtggcagcagccgggttcagaggagtgggccggtggacgaggccctggctgaggagctggaagccccccggcccgaagaggaaggctcagggacagcgctggcccccgtgggcgcccctgccctccgcacccgccgcagccggagccccgcgccgccgccgccaatgccgctgccccggcccccgacaccgcccgcaggctgctggcagtgggacgggccctggggctgcgggggcgagggtgccgccccccgccaggccctggccgctgccgagtgcccaccctgtgccatggccgggcccccacccgccccccagcccctgccgggagacgccagcttttacagcctcccgcccccaccgctaccgcccacctcggatcccctcgagaccccagcgccctcccctagccccagccccagcccccaggccgtgtgctggcccagcggctggcattag

SEQ ID NO: 554 - DNA, 1437 bp, Homo Sapiens
atgttatcagatgagttagaatccaaaccagagctcctggtacagtttgttcagaatacgtccatcccattgggacaggggcttgtagaatcagaagctaaagatattacttgcttgtccctccttcccgtgactgaagcctcagaatgcagtcggctaatgttaccagatgatactacaaatcattctaactcctccaaggaggtcccttcctcagctgttttgagaagccttcgggtgaatgtgggtccagacggagaggagacgagagctcagactgtacagaaatccccggagtttttgtccacttcagagtcttctagcttgttgcaagatctacagccaagtgatagcacttcttttattcttcttaacctaacaagagcaggtctgggctcttcagctgagcacttagtgtttgtacaggatgaggcagaagattcagggaatgatttcctctccagtgagagcacagacagtagcattccatggttcctccgggttcaggagttggcccatgacagtttgattgctgctactcgtgcacaactggcaaagaatgcaaaaaccagcagcaatggagaaaatgtccaccttggttctggtgatgggcagtcaaaagattctgggccccttcctcaagtggaaaagaagctcaagtgtacagttgaaggttgtgaccggacatttgtatggccagctcactttaaataccacctcaagactcatcgaaatgaccgctccttcatctgtcctgcagaaggttgtgggaaaagcttctatgtgctgcagaggctgaaggtgcacatgaggacccacaatggagagaagccctttatgtgccatgagtctggctgtggtaagcagtttactacagctggaaacctgaagaaccaccggcgcatccacacaggagagaaacctttcctttgtgaagcccaaggatgtggccgttcctttgctgagtattctagcctccgaaaacatctggtggttcactcaggagagaagcctcatcagtgccaagtctgtgggaagaccttctctcagagtggaagcaggaatgtgcatatgagaaagcatcacctgcagctgggagcagctgggagtcaagagcaggagcaaactgctgagccactaatgggcagtagtttgcttgaagaggcttcagtacccagtaaaaacctggtgtctatgaattcccagcccagccttggtggagagtccttgaacctaccaaataccaattctatcctgggagttgatgatgaggtgcttgctgaaggatccccacgttccctgtcttcagtgcctgatgtgacacatcacctggtgaccatgcagtcagggaggcaatcatatgaagtttctgtcttaactgcagtaaatccacaagagttactaaaccaaggagatttaactgaaagacggacatga

SEQ ID NO: 555 - DNA, 1233 bp, Homo Sapiens
atgccaggtgtctgtgatagggcccctgacttcctctccccgtctgaagaccaggtgctgaggcctgccttgggcagctcagtggctctgaactgcacggcttgggtagtctctgggccccactgctccctgccttcagtccagtggctgaaagacgggcttccattgggaattgggggccactacagcctccacgagtactcctgggtcaaggccaacctgtcagaggtgcttgtgtccagtgtcctgggggtcaacgtgaccagcactgaagtctatggggccttcacctgctccatccagaacatcagcttctcctccttcactcttcagagagctggccctacaagccacgtggctgcggtgctggcctccctcctggtcctgctggccctgctgctggccgccctgctctatgtcaagtgccgtctcaacgtgctgctctggtaccaggacgcgtatggggaggtggagataaacgacgggaagctctacgacgcctacgtctcctacagcgactgccccgaggaccgcaagttcgtgaacttcatcctaaagccgcagctggagcggcgtcggggctacaagctcttcctggacgaccgcgacctcctgccgcgcgctgagccctccgccgacctcttggtgaacctgagccgctgccgacgcctcatcgtggtgctttcggacgccttcctgagccgggcctggtgcagccacagcttccgggagggcctgtgccggctgctggagctcacccgcagacccatcttcatcaccttcgagggccagaggcgcgaccccgcgcacccggcgctccgcctgctgcgccagcaccgccacctggtgaccttgctgctctggaggcccggctccgtgactccttcctccgatttttggaaagaagtgcagctggcgctgccgcggaaggtgcagtacaggcctgtggaaggagacccccagacgcagctgcaggacgacaaggaccccatgctgattcttcgaggccgagtccctgagggccgggccctggactcagaggtggacccggaccctgagggcgacctgggtgtccgggggcctgtctttggagagccatcagctccaccgcacaccagtggggtctcgctgggagagagccggagcagcgaagtggacgtctcggatctcggctcgcgaaactacagtgcccgcacagacttctactgcctggtgtccaaggatgatatgtag

SEQ ID NO: 556 - DNA, 1107 bp, Homo Sapiens
atggcgtactccacagtgcagagagtcgctctggcttctgggcttgtcctggctctgtcgctgctgctgcccaaggccttcctgtcccgcgggaagcggcaggagccgccgccgacacctgaaggaaaattgggccgatttccacctatgatgcatcatcaccaggcaccctcagatggccagactcctggggctcgtttccagaggtctcaccttgccgaggcatttgcaaaggccaaaggatcaggtggaggtgctggaggaggaggtagtggaagaggtctgatggggcagattattccaatctacggttttgggatttttttatatatactgtacattctatttaagctctcaaaggggaaaacaactgcagaggatgggaaatgctatactgccatgcctggaaacacccacaggaaaattaccagttttgagcttgctcaactgcaagaaaaactgaaggagacagaagcagccatggaaaaattaatcaacagagtgggacctaatggtgagagagcacagactgtgacttctgaccaagagaaacggttgctacatcagctccgagaaatcaccagggtcatgaaagaaggaaaattcattgacagattttctccagagaaagaagctgaggaggccccttacatggaggactgggaaggttaccctgaagagacttacccaatttatgacctttcagactgtatcaagcgtaggcaagaaacaatcttggtggattaccctgacccaaaagaactttctgctgaagaaatagctgaaagaatgggaatgatagaagaggaagaatcagatcatttgggttgggaaagtctgcccactgaccccagagcccaggaagataattctgttacctcgtgtgatccaaagccagaaacatgttcctgctgttttcatgaagacgaggatcctgctgtcttggcagagaatgctggattcagtgcagatagctaccctgagcaagaggaaaccaccaaagaagagtggtcccaagactttaaagatgaagggttgggcatcagcaccgataaagcatatacaggcagcatgctgaggaagcgtaacccccagggtttagagtga

SEQ ID NO: 557 - DNA, 2040 bp, Homo Sapiens
atgggacaggctgctgagccaactgggtacatggaaaactcagtctcctacagcgcaattgaagacgttcagctgctgtcctgggagaatgccccgaagtactgtttacagctcacgattcctgggggaactgtcttactgcaggctgccaatagctacctgcgagaccagtggttccattctctgcaatggaagaaaaagatttacaaatataagaaagtgctgagtaacccaagccgctgggaagttgtcttgaaagagatccggaccctggtggacatggccctgacatcccccctgcaggatgactccatcaaccaggccccactggaaatcgtctcgaaactgctctcagagaacacaaacttgaccacccaggagcatgaaaacatcattgtggcaatcgctcctttgctggaaaacaaccacccaccaccagatctctgtgaattcttttgcaagcactgcagagagcggccccggtccatggtggtcatcgaggtgttcacccccgtggtgcagcgaatcctcaagcataacatggactttgggaagtgcccgcgactgaggctgtttactcaggagtacatccttgccttgaacgagctcaacgcggggatggaagtggtgaagaagttcattcagagcatgcacggccccacagggcactgcccccacccccgggtcctgcccaacctggtggccgtgtgcctggctgccatctactcctgctatgaagagttcatcaacagccgcgacaattccccaagcctgaaggaaatccggaacggctgccagcagccgtgcgaccggaagcccactttacctctgcgccttctgcaccccagcccggacctggtgtctcaggaagccacgctgtctgaggcccggctcaagtcggtggtcgtggcctccagtgagatccacgtggaggtggaacgcaccagcactgccaagccggcgctgacggccagcgcaggcaacgacagcgagcccaacctcatcgactgcctcatggtcagccccgcctgcagcaccatgagcatcgagctgggcccccaggccgaccgcacgctcggctgctacgtggaaatcctcaagctgctgtcagactatgatgactggagaccgtctctggccagtttgcttcaacccattccattccccaaagaagctctcgcacatgagaagttcaccaaggaactgaagtacgtgattcagaggttcgccgaagaccccaggcaagaggtccactcatgcctgctgagcgtgcgggccggcaaagatggctggttccagctctacagccccggaggggtggcctgcgacgatgacggggagctgttcgccagcatggtgcacatcctcatgggctcctgttacaagaccaaaaaattcctgctctccctggcagaaaacaagctgggtccctgcatgctcctggcactgagggggaaccagaccatggtggagatcctgtgcttgatgctggaatacaacatcatcgacaacaacgacacccaactgcagatcatctcaaccctggagagcacagacgtggggaagcgcatgtacgagcagctgtgtgaccggcagcgggagctgaaggagctgcaaaggaaaggcgggcccaccaggctaacactgccctccaagtccacagacgctgacttggctcgtttgctgagctccggctccttcggaaacctggagaacctcagtttggccttcaccaatgtaaccagtgcctgcgccgagcacctcatcaaactgccttcgctcaagcagctgaacctgtggtccactcagtttggagacgctggccttcggctcctgtcggaacacctcaccatgctccaggtgctgaacctgtgcgagaccccggtcacagacgctggcctgctggccctgagctccatgaagagtctctgcagtttaaacatgaacagcaccaagctctcagctgacacctacgaagatctgaaggccaagcttcccaatttgaaggaagtggacgtccgctacaccgaagcctggtga

SEQ ID NO: 558 - DNA, 1446 bp, Homo Sapiens
atgaatgaggtgtctgtcatcaaagaaggctggctccacaagcgtggtgaatacatcaagacctggaggccacggtacttcctgctgaagagcgacggctccttcattgggtacaaggagaggcccgaggcccctgatcagactctaccccccttaaacaacttctccgtagcagaatgccagctgatgaagaccgagaggccgcgacccaacacctttgtcatacgctgcctgcagtggaccacagtcatcgagaggaccttccacgtggattctccagacgagagggaggagtggatgcgggccatccagatggtcgccaacagcctcaagcagcgggccccaggcgaggaccccatggactacaagtgtggctcccccagtgactcctccacgactgaggagatggaagtggcggtcagcaaggcacgggctaaagtgaccatgaatgacttcgactatctcaaactccttggcaagggaacctttggcaaagtcatcctggtgcgggagaaggccactggccgctactacgccatgaagatcctgcggaaggaagtcatcattgccaaggatgaagtcgctcacacagtcaccgagagccgggtcctccagaacaccaggcacccgttcctcactgcgctgaagtatgccttccagacccacgaccgcctgtgctttgtgatggagtatgccaacgggggtgagctgttcttccacctgtcccgggagcgtgtcttcacagaggagcgggcccggttttatggtgcagagattgtctcggctcttgagtacttgcactcgcgggacgtggtataccgcgacatcaagctggaaaacctcatgctggacaaagatggccacatcaagatcactgactttggcctctgcaaagagggcatcagtgacggggccaccatgaaaaccttctgtgggaccccggagtacctggcgcctgaggtgctggaggacaatgactatggccgggccgtggactggtgggggctgggtgtggtcatgtacgagatgatgtgcggccgcctgcccttctacaaccaggaccacgagcgcctcttcgagctcatcctcatggaagagatccgcttcccgcgcacgctcagccccgaggccaagtccctgcttgctgggctgcttaagaaggaccccaagcagaggcttggtggggggcccagcgatgccaaggaggtcatggagcacaggttcttcctcagcatcaactggcaggacgtggtccagaagaagctcctgccacccttcaaacctcaggtcacgtccgaggtcgacacaaggtacttcgatgatgaatttaccgcccagtccatcacaatcacaccccctgaccgctatgacagcctgggcttactggagctggaccagcggacccacttcccccagttctcctactcggccagcatccgcgagtga

SEQ ID NO: 559 - DNA, 15516 bp, Homo Sapiens
atgcacagtagtagttatagttaccgtagcagtgattctgtgtttagtaacactaccagcactcgaaccagtcttgattcaaatgaaaatcttctcttggttcattgtggtccaacactgatcaactcttgcattagcttcggcagtgaatcctttgatggacacaggttagaaatgttgcaacagattgccaacagagttcagagggacagtgtcatctgtgaagacaaactgattcttgctggaaatgctcttcagtctgattctaaaagattagaatcaggagtgcagtttcagaatgaagcagaaattgctgggtatatacttgaatgtgagaaccttttacgccagcatgtaattgatgtacagattcttattgatggaaaatactaccaggcagatcaattggtacagagggttgcaaaactgcgtgacgaaattatggccttaaggaacgaatgttcttctgtgtacagcaaaggacgcatactgacaacagaacagacaaagctcatgatatcaggaatcactcaaagtttaaactcaggatttgcacagaccttacaccctagtctgacctcagggctgacccagagtttaacaccttccctaacctcttctagtatgacttctggcctgtcatcagggatgacttcccgcctgactccatctgtcactccagcttatacacctggtttcccatcaggattagttccaaatttcagttcaggagtagagccaaattcattgcaaactttgaagttgatgcagatccgaaaaccccttctaaagtcttctttgctggatcaaaatttaacagaagaagaaatcaatatgaaatttgttcaggatcttttgaattgggttgatgagatgcaggtacaactggaccgcactgagtggggctcagatttgccaagtgttgaaagccatttagaaaatcataaaaatgttcatagagctattgaagaatttgaatctagtctcaaagaagctaaaatcagtgagattcaaatgacagcacctcttaaactgacttatgcagaaaagttgcacagattagagagtcagtatgcaaaactcttgaatacatccaggaatcaagaacggcaccttgatacactccataattttgtaagtcgtgcgactaatgaacttatttggttgaatgaaaaagaagaggaggaagttgcttatgactggagtgagagaaacaccaacatagctaggaaaaaagattatcatgctgaattaatgagagaacttgatcaaaaggaagaaaatattaaatcagttcaggagatagcagagcagctacttctagaaaatcatccagcccggttaactattgaggcctacagagcggcaatgcagacgcagtggagctggatcttacagctctgccagtgtgtggagcagcacataaaggagaacacagcgtatttcgagtttttcaatgatgccaaagaagctactgattacttaaggaatctaaaagatgccattcagcggaagtacagctgtgatagatcaagcagcattcacaagctagaagaccttgttcaggaatcaatggaagagaaagaagaacttctgcagtacaaaagcactatagcaaacctaatgggaaaagcaaaaacaataattcaactgaagccaaggaattctgactgtccactcaaaacttctattccgatcaaagctatctgtgactacagacaaattgagataaccatttacaaagacgatgaatgtgttttggcgaataactctcatcgtgctaaatggaaggtcattagtcctactgggaatgaggctatggtcccatctgtgtgcttcaccgttcctccaccaaacaaagaagcggtggaccttgccaacagaattgagcaacagtatcagaatgtcctgactctttggcatgagtctcacataaacatgaagagtgtagtatcctggcattatctcatcaatgaaattgatagaattcgagctagcaatgtggcttcaataaagacaatgctacctggtgaacatcagcaagttctaagtaatctacaatctcgttttgaagattttctggaagatagccaggaatcccaagtcttttcaggctcagatataacacaactggaaaaggaggttaatgtatgtaagcagtattatcaagaacttcttaaatctgcagaaagagaggagcaagaggaatcagtttataatctctacatctctgaagttcgaaacattagacttcggttagagaactgtgaagatcggctgattagacagattcgaactcccctggaaagagatgatttgcatgaaagtgtgttcagaatcacagaacaggagaaactaaagaaagagctggaacgacttaaagatgatttgggaacaatcacaaataagtgtgaggagtttttcagtcaagcagcagcctcttcatcagtccctaccctacgatcagagcttaatgtggtccttcagaacatgaaccaagtctattctatgtcttccacttacatagataagttgaaaactgttaacttggtgttaaaaaacactcaagctgcagaagccctcgtaaaactctatgaaactaaactgtgtgaagaagaagcagttatagctgacaagaataatattgagaatctaataagtactttaaagcaatggagatctgaagtagatgaaaagagacaggtattccatgccttagaggatgagttgcagaaagctaaagccatcagtgatgaaatgtttaaaacgtataaagaacgggaccttgattttgactggcacaaagaaaaagcagatcaattagttgaaaggtggcaaaatgttcatgtgcagattgacaacaggttacgggacttagagggcattggcaaatcactgaagtactacagagacacttaccatcctttagatgattggatccagcaggttgaaactactcagagaaagattcaggaaaatcagcctgaaaatagtaaaaccctagccacacagttgaatcaacagaagatgctggtgtccgaaatagaaatgaaacagagcaaaatggacgagtgtcaaaaatatgcagaacagtactcagctacagtgaaggactatgaattacaaacaatgacctaccgggccatggtagattcacaacaaaaatctccagtgaaacgccgaagaatgcagagttcagcagatctcattattcaagagttcatggacctaaggactcgatatactgccctggtcactctcatgacacaatatattaaatttgctggtgattcattgaagaggctggaagaggaggagaagtcactggaagaagaaaagaaagaacatgttgaaaaagccaaagaattgcaaaaatgggtatcaaatatcagcaagacattgaaagatgcagagaaggctggaaaacctcccttctctaagcaaaagatttccagtgaggaaatatcaaccaagaaggaacaattatcggaagcacttcaaactatacagctttttttggcaaaacatggagacaaaatgacagatgaagaaagaaatgaattggaaaaacaagtgaaaactcttcaggaaagttataatttattattcagtgaatctctgaaacagctacaagaatcacaaacctcaggagatgtaaaggtagaggagaagattgtagcagagcgtcagcaggagtataaagagaaactccaagggatatgtgatcttcttacccaaactgaaaaccgcctaattggtcaccaagaagccttcatgattggagatggcacagttgagttaaagaaatatcagtccaagcaagaggaattacagaaagatatgcaaggaagtgcacaggcattggctgaagtagtgaaaaacacagagaacttcttaaaagagaatggtgaaaagctgtcacaggaagataaggctttgattgaacagaaacttaatgaagctaagataaagtgtgaacagcttaatttaaaagcagaacagtctaaaaaggagctggataaagttgtgacaacagcaatcaaggaagaaactgaaaaggtagcagcagtgaagcagctggaagagagcaaaaccaaaatagaaaaccttttggactggttgtcaaatgttgacaaagactcagaaagggcagggacaaaacacaaacaggtaatcgaacagaacgggacccattttcaagaaggtgatggcaagtcagcaattggagaagaggatgaagttaatggtaacctgttggagactgatgttgatgggcaagttggaaccactcaggagaatctgaatcagcaatatcagaaagttaaggcccaacacgagaagatcatctctcagcaccaagcagtgatcatagccactcagtctgcacaagtgttgcttgagaaacagggtcagtatctctctcctgaagaaaaagagaaactgcaaaagaacatgaaggaactgaaagtgcattatgaaactgcactggctgagtcagagaagaaaatgaagttaactcactctctgcaggaagaattagaaaagtttgatgctgactataccgagtttgagcactggctacagcagtcagaacaagaacttgaaaacctggaggcaggtgcagatgacatcaatggtttaatgaccaaattgaagaggcagaagagtttctcagaagacgttatttctcacaaaggtgacttgagatacatcacaatttctggaaacagagtgttggaagctgccaaatcttgcagcaagagagacggtggcaaggttgatacttctgcaacccacagagaagtgcagcgcaagttggatcatgctactgatcggttcaggtctctctactctaagtgcaatgttcttggaaataatcttaaagatctggtggataaatatcaacactatgaagatgcttcatgtggacttcttgctggactccaggcctgtgaggccacagcgagcaaacacttatctgaacctattgcggtggaccccaaaaatcttcaaaggcaattagaagagaccaaggctttgcaaggacagatatcaagtcagcaggttgctgtagagaaactgaagaaaacggctgaagtgcttttagatgccaggggatctttacttccagccaagaatgatatccagaaaacacttgatgacattgttgggagatatgaggatctgtccaagtctgttaatgaacgaaatgaaaaactccagataaccttgacccgttcactgagtgtgcaggatggcttggatgaaatgctggactggatgggaaatgtggaaagttctctgaaagaacaaggtcaagtgcctttaaactctactgctcttcaggatattatcagtaaaaacattatgttggaacaggatattgcaggtcgtcagagcagtataaatgccatgaatgaaaaagtgaagaaatttatggaaacaacagatccatccactgcatcctcactgcaagccaaaatgaaagacttgtctgctcggttttcagaagcaagtcataaacacaaagaaactcttgccaaaatggaggagctaaaaaccaaagtagaactgtttgagaacctctcagaaaagctccagacatttttagaaacaaaaactcaggctcttactgaagtagatgtgccaggaaaagatgttactgaattgtctcagtatatgcaggaatcaacttctgaatttttagaacacaagaaacatcttgaagttttgcatagtctcttgaaggagatatccagccatggcttaccaagtgataaggctttggtccttgaaaaaacaaataatttgtcaaagaaattcaaggaaatggaggataccatcaaagaaaaaaaagaagctgtaacttcttgtcaagaacagttggatgctttccaagttcttgttaaatcattgaagtcatggataaaagaaacaacaaaaaaagttcccattgtacagccttcttttggtgcagaggatttaggaaaatctttggaagacactaagaaattacaagaaaagtggagtttaaaaacaccagagattcagaaagtaaacaacagtgggatctcactatgtaacttaataagtgctgtgaccacccctgcaaaggcaatagcagcagttaaatcaggtggagcagtattaaatggtgaaggaacagccacaaatactgaggaattttgggcaaataaaggtttaacatccattaaaaaggacatgactgacataagtcatggttatgaagatcttggcctcttactcaaggacaaaatagcggaactgaacactaaactctccaaattgcaaaaggctcaggaagaatcaagtgcaatgatgcagtggttacagaaaatgaacaaaactgcaacaaaatggcagcagacacctgcacctacagatactgaagctgtgaagactcaagttgagcagaataagtcgtttgaggcagaactgaagcagaatgtaaacaaagtacaggagttgaaagacaaattgacagagctgttggaggagaacccagatactcctgaggcccccagatggaaacagatgttgacagaaatagattctaagtggcaagaactcaatcaattaacaattgatagacaacaaaaactggaagaatcctccaataatctaacccagttccagactgtagaggcccaattgaaacagtggcttgtggaaaaagaacttatggtcagtgttcttgggcccttgtcaattgacccaaatatgctaaacacacaaaggcagcaggtgcagattttgctgcaagaattcgccactcggaaacctcaatatgaacagctgacagcagctggtcagggcattctgagcaggcctggagaagacccttctttacgtgggattgtgaaagagcaactggcagctgtgacccaaaaatgggatagcctaacagggcaattgagtgacagatgtgactggattgaccaagccattgttaaaagcacacagtatcaaagcctgctgagaagcctttctgataaactgagtgacttggataataaactcagcagcagtctggctgtgagcacgcaccctgatgctatgaaccaacagttggaaacagcccaaaaaatgaagcaggagatacagcaggaaaagaagcagataaaagtggcccaggcactctgtgaggatttgtcagcactggttaaagaagagtacttgaaagcagaacttagtaggcaactagaaggcatcttaaaatcatttaaggatgttgaacagaaagcagagaatcatgtccagcaccttcagtcggcctgtgcaagctctcatcaatttcagcaaatgtctagagattttcaggcttggctggatacaaagaaagaagagcaaaacaaatctcatccaatatctgccaaactcgatgtcttggagtcattaattaaagatcataaagactttagtaaaactttgaccgctcagtctcatatgtatgaaaaaaccattgcagaaggtgaaaatctgttattaaaaacacaagggtctgagaaggcagccttacagttacagcttaatacaattaaaaccaattgggatacatttaataagcaggtgaaagaaagagaaaacaagttaaaagagtcattggaaaaagcccttaagtataaagagcaagtagagactctctggccatggatagacaaatgccaaaacaacctggaggaaataaaattttgcttggatcctgctgaaggagagaattctattgccaagttaaagtctctgcagaaggaaatggaccaacactttggtatggtagaattactgaacaacacagccaatagcttgctcagtgtctgtgagatagataaagaagttgttacagatgagaataagtcactgatccagaaggtggacatggtcactgaacaacttcacagtaagaaattctgtctggagaacatgactcagaagtttaaagaatttcaagaagtttccaaagaatctaaaaggcagcttcagtgtgcaaaggagcagctagatatccatgattcgctgggatcccaggcttacagtaacaaatacctgaccatgttgcaaactcagcagaaatcacttcaggccttgaagcatcaggtagatttggctaaaagacttgcacaggaccttgtggtagaggcctcagactcaaagggaacctctgatgttttattacaagtggaaaccatagctcaagagcatagtacactaagtcagcaggttgatgaaaagtgttctttcttagaaaccaagcttcagggcattgggcatttccagaataccattcgagaaatgttttctcagttcgcagagtttgatgatgaactggatagcatggctccagtggggagagatgcagaaacattgcaaaagcaaaaggaaactataaaagcctttctaaagaaactagaagccctcatggcaagcaatgacaatgccaataaaacctgcaagatgatgttagccacagaagaaacctctcctgaccttgttggaatcaaaagggacttggaggccttaagcaaacaatgcaacaagttactggaccgagcccaagccagagaagagcaggttgaagggacaattaagcgccttgaagaattttacagcaaattgaaagaattttctattctgctccagaaagccgaagaacatgaagagtcacaaggtcctgttggtatggaaacggagacaattaatcagcagcttaacatgttcaaggtattccagaaagaagagattgaacccttgcaaggtaaacagcaagatgtaaactggttaggtcaaggccttattcagagtgctgccaaaagcactagcactcagggcttggagcatgacctggatgatgtcaatgcacggtggaagactctcaataagaaggtggctcagcgagcagcccagctgcaggaggccttgctgcactgtgggaggttccaggatgccctggagtccctgctcagctggatggtggacactgaggagcttgtggccaatcagaagcccccgtcggctgagttcaaagtggtaaaggcccagatacaagaacaaaagcttctccagagattgttggatgaccgaaaatctacggtggaggtaatcaaacgagaaggagaaaaaattgctacaacagcagagcccgcagataaagtgaagattttgaaacagctcagtctcttggatagcagatgggaggcattgcttaataaagctgaaacaaggaatcgtcagttggaaggtatctcggtggtagcacagcaatttcatgaaaccttagaaccactgaacgagtggcttacaaccatagaaaagaggctggtgaattgtgaacccataggaacccaagcatctaaacttgaggaacaaattgcacagcacaaagccttagaagatgacatcatcaatcacaataaacatttacaccaggctgttagcattggccagtccttaaaggttttgagctccagggaggataaagatatggtgcagagtaaattagacttctctcaagtatggtacattgagattcaagagaaaagtcacagcaggtctgagctcctccagcaggccttatgtaatgctaagatttttggggaagatgaagttgaactgatgaactggctgaatgaagtgcatgacaaactgagcaagctctcagtccaggattacagcactgaggggctatggaagcagcagtctgaacttcgggttctgcaagaggacatcttactcaggaaacaaaatgtagatcaggctttactaaatggtttagaactacttaaacaaaccacaggtgatgaagttttaataattcaagataaattggaagccattaaagcaaggtacaaagacattactaaactgagcactgatgtggccaagactctggaacaggcgctgcagcttgcaaggcggctgcactccacacacgaagagctgtgtacctggctggacaaagtggaggtggaattactttcatatgaaactcaggttctgaaaggagaagaagcaagtcaagcacaaatgagaccaaaggaactgaaaaaggaagctaagaacaacaaagccttactggactcccttaatgaagtgagcagtgctttgctggaactggtaccatggagggcaagagaaggacttgagaaaatggtagctgaggacaatgagcgctaccgattagtgagcgacaccatcactcagaaggtggaggagatcgatgcagccattctgcgatcacagcagtttgaccaagcagctgatgctgagttatcctggattactgaaacagaaaaaaaattgatgtctctgggtgacatcaggcttgagcaagaccagacttctgctcagcttcaagttcaaaagacattcaccatggagattttgagacacaaggatattattgatgaccttgttaaatctgggcataaaatcatgaccgcatgcagtgaagaggaaaagcaatcaatgaagaaaaaactggacaaggtactgaagaactatgataccatctgccagattaattcagaaaggtatctgcagctggaacgggcacagtccctggttaaccaattctgggaaacatatgaagaactttggccatggctgacagaaacacaatcaatcatctctcagcttcccgccccagcccttgaatatgaaactctaaggcagcagcaggaagaacatcggcaactgcgtgagttgatagctgaacacaagcctcatatagataagatgaacaaaactgggccacagttactggaattgagccctggggaaggcttttctatccaagagaagtatgtggcagccgacaccctttacagtcaaattaaagaagatgtcaaaaagcgtgctgtggcactggatgaagccatttctcaatcaactcagttccatgacaagatagatcagatccttgagagcctggaacgcatcgtggaacgtctgaggcagccaccctctatctctgcagaggttgagaagatcaaggaacagatcagtgaaaataagaatgtgtcagtagacatggaaaagctacagccgttgtatgaaactcttaaacagaggggagaggaaatgattgctagatctggggggactgataaagacatatctgccaaagctgttcaggataagcttgaccaaatggttttcatttgggagaacatacacacactggtggaagagagggaagccaaactactggatgtgatggagctagcagaaaagttctggtgtgatcacatgtcattgatagttaccattaaagatactcaagatttcatccgggacctggaagatcctggaattgatccttcagtagtaaaacaacagcaagaagcagcagagaccataagggaagaaatagatggactacaggaggagctggatatagttattaacctaggttctgaactcattgcggcatgtggggagcctgataaacccattgtcaagaagagtatagatgagttaaattcagcatgggattctctaaataaagcttggaaagaccggattgacaaacttgaggaggcaatgcaggctgccgttcagtaccaggatggactgcaggcggtatttgactgggtagatattgcaggtggtaaattagcttcaatgtctccaattggaacagatctcgaaactgtcaagcagcagattgaagagctaaagcaatttaagtctgaggcctatcaacagcagatagaaatggaaagactgaatcatcaagcagagcttttgctaaagaaagtaacagaagagagtgacaaacacactgttcaagacccattaatggaactgaaattgatatgggatagcctggaggagagaatcatcaacagacagcataaactggagggtgctctattagccttgggtcagttccaacatgccctggatgagctcctggcatggctgacacacaccgagggcttgctaagtgagcagaaacctgttggaggagaccctaaagccattgaaattgaacttgccaagcatcatgtgctccaaaatgatgtattagcccatcagtccacagtggaagccgttaataaagcaggaaatgatctaattgaatcaagtgcaggagaagaagcaagcaaccttcagaacaagctagaggttttaaatcaacgctggcaaaatgttttggaaaaaacagaacaaaggaagcagcagctggatggtgccttgcgccaggccaaagggttccatggcgaaattgaggatttgcagcagtggctgactgacacggagcgtcatctgttggcatctaaaccgctgggaggtttaccggaaacagccaaggagcagcttaatgtccatatggaagtctgtgctgcctttgaagctaaagaagaaacatataagagtctgatgcagaaaggccagcagatgcttgcaagatgcccaaaatctgcagagacaaatattgaccaagacataaataacttgaaagaaaaatgggaatcggtggaaaccaaactcaatgaaaggaaaactaaactggaagaggctctcaacttggcaatggagttccacaattctctccaagacttcatcaactggcttactcaggctgaacagaccctaaatgtagcttctcggccaagtctcatcttggacacagtcttatttcaaattgacgaacacaaggtttttgccaatgaagtaaattctcatcgtgagcagataatagagctggacaaaactggaacccacctaaaatattttagtcagaaacaagatgttgttctaatcaagaatctacttatcagtgtacaaagtcgatgggaaaaagtggttcaacggttggtagagagaggaagatctttggatgatgcaaggaagagagccaagcagttccatgaagcttggagtaaacttatggagtggctagaagagtcagaaaagtctttggattctgaactggaaatcgcaaatgatccagacaaaataaaaacacaacttgcacaacataaggagtttcagaaatcactcggagccaagcattctgtctacgacaccaccaacaggactggacgttctctgaaggagaaaacctccctggctgatgacaacctgaaactggatgacatgctgagtgaactcagagacaaatgggataccatatgtggaaaatctgtggaaagacaaaacaaattggaggaagccctgttattttctggacaattcacagatgccctacaggctctcattgattggttatatagagttgaaccccagctggcagaagaccagcctgttcatggagacattgatttggtgatgaatctgatcgataatcacaaggccttccaaaaagagttggggaagaggaccagcagtgtgcaggccctgaagcgctcagcccgagaactcatagaaggcagtcgggatgactcctcctgggtcaaggtccagatgcaggaattaagcacacgctgggagaccgtgtgtgcactttctatatcaaagcaaacacggttagaagcagccctgcgtcaggcagaggaattccactcggtggtacatgccctcttggagtggctggctgaggcggagcaaaccctgcgtttccatggtgtcctcccagatgatgaggatgctctccggactctcattgatcagcataaagaattcatgaagaaactggaagaaaagagagctgaactaaataaagccaccactatgggcgacaccgttttggctatctgccaccccgactccatcactaccattaagcactggataacaatcatccgggcgaggtttgaggaggtgctggcctgggcaaagcaacatcagcagagattagcaagtgctctggctgggcttattgccaaacaggaattgttggaagctttgctggcttggttgcaatgggctgaaactacacttactgataaggataaagaagtcatcccccaggagatcgaagaggtgaaagcactcattgcagaacaccagaccttcatggaggaaatgaccagaaaacagcctgatgttgataaagtaacgaagacctataagaggagagctgctgatccttcctcattacaatcccatattccagtcttggataagggacgagcaggaagaaaacgctttccagcatcaagcttgtatccctctgggtcacagacacaaattgaaaccaaaaatcctagggtaaacttactggtgagcaaatggcagcaagtctggctcctggcgttggaaagaaggaggaaactcaatgatgccttggacagactagaggagctgagggaatttgctaactttgattttgatatctggcgcaaaaaatacatgcgatggatgaatcacaagaaatctcgagtgatggacttcttcaggagaattgataaagaccaggatgggaaaataacgcggcaggaatttattgatggaattctttcctcaaagtttccaaccagtcgcttggagatgagcgcagttgcagacatctttgacagagatggcgatggatatattgactactatgaatttgtagcagcccttcacccaaataaagatgcatataaacctatcacagatgccgacaaaatcgaagatgaggtgacaaggcaggtagctaagtgtaaatgtgcaaagcgatttcaagttgagcagattggtgataataaatacaggttcttcctgggaaatcagtttggagactcccagcaactgcgactggtccggatcctgcggagtactgtgatggttcgtgttggaggtggatggatggcacttgatgagttcttagtgaaaaatgatccttgcagggccaaaggaaggacaaacatggaactgcgtgagaagttcattttagcagatggtgccagccagggtatggctgctttccgaccccgaggccgaagatcccggccatcatcacgaggcgcttcacccaacagatccacttctgtgtccagtcaggctgcgcaggcggcctccccacaggtccctgccaccaccacacccaagattctccatcctttaacacgcaattatggtaaaccatggttgacaaacagcaaaatgtcaactccttgtaaagcagcagagtgctcagactttcccgtgccatctgcagagggaacgccaatacaaggaagcaagcttcgacttccaggatatttatcagggaaaggcttccactctggggaggacagtggcttgataacaactgcagctgccagagtccgaacacagtttgctgattccaagaagactcccagccgaccaggaagtcgagctggaagcaaagctggcagcagggccagcagccgccgaggcagtgatgcatcagactttgacatttcagaaatccagtccgtgtgctcagatgtggaaactgtcccccagacacacagacctacaccccgagcaggttctcggccatccacagcgaagccttcaaaaatccccacgccccagaggaaatcacctgccagcaaattggacaagtcctcaaagagatag

SEQ ID NO: 560 - DNA, 2223 bp, Homo Sapiens
atggcggccttctccgagatgggtgtaatgcctgagattgcacaagctgtggaagagatggattggctcctcccaactgatatccaggctgaatctatcccattgatcttaggaggaggtgatgtacttatggctgcagaaacaggaagtggcaaaactggtgcttttagtattccagttatccagatagtttatgaaactctgaaagaccaacaggaaggcaaaaaaggaaaaacaacaattaaaactggtgcttcagtgctgaacaaatggcagatgaacccatatgacagaggatctgcttttgcaattgggtcagatggtctttgttgtcaaagcagagaagtaaaggaatggcatgggtgtagagctactaaaggattaatgaaagggaaacactactatgaagtatcctgtcatgaccaagggttatgcagggtcgggtggtctaccatgcaggcctctttggacctaggtactgacaagtttggatttggctttggtggaacaggaaagaaatcccataacaaacaatttgataattatggagaggaattcactatgcatgataccattggatgttacctggatatagataagggacatgtcaagttctccaaaaatggaaaagatcttggtctggcatttgaaataccaccacatatgaaaaaccaagccctctttcctgcctgtgttttgaagaatgctgaactgaaatttaacttcggtgaagaggaatttaagtttccaccaaaagatggctttgttgctctttccaaggcaccggatggttacattgtcaaatcacagcactcaggtaatgcacaggtgacacaaacaaagtttctccccaatgctccgaaagctctcattgttgaaccttcccgggagttagctgaacaaactttgaacaacatcaagcagtttaagaaatacattgataatcctaaattaagggagcttctgataattggaggtgttgcagcccgggatcagctctctgttttggaaaatggagtagatatagttgtaggtactccgggaagactagatgacttggtgtcaactggaaagctgaacttatctcaagttagattcctggtcctggatgaagctgatgggcttctttctcaaggttattctgattttataaataggatgcacaatcagattcctcaggttacctctgatggaaaaagacttcaggtgattgtttgctctgccactttgcattctttcgatgtaaagaaactgtccgagaagataatgcattttcctacatgggttgacttaaaaggagaagactctgttccagatactgtacaccatgttgttgtcccagtaaatcccaaaactgacagactctgggaaaggcttggaaagagccacattagaactgatgatgtacatgcaaaagataacacaagacctggtgctaatagtccagagatgtggtctgaagctattaaaatcctgaaaggggagtatgctgtccgggcaatcaaggaacataagatggatcaagcaattatcttctgtagaaccaaaattgactgtgataacttggagcagtactttatacaacaaggaggaggacctgataaaaaaggacaccagttctcatgtgtttgtcttcatggtgacagaaagcctcatgagagaaagcaaaacttggaaagatttaagaaaggagatgtaagattcttgatttgcacagatgtagctgctagaggaattgatatccacggtgttccttatgttataaatgtcactctgcccgatgaaaagcaaaactacgtacatcgaattggcagagtaggaagagctgaaaggatgggtctggcaatttccctggtggcaacagaaaaagaaaaggtttggtaccatgtatgtagcagccgtggaaaagggtgttataacacaagactcaaggaagatggaggctgtaccatatggtacaacgagatgcagttactatctgagatagaagaacacctgaactgtaccatttctcaggttgagccggatataaaggtaccagtggatgaatttgatgggaaagttacctacggtcagaaaagggctgctggtggtggaagctataaaggccatgtggatattttggcacctactgttcaagagttggctgcccttgaaaaggaggcgcagacatctttcctgcatcttggctaccttcctaaccagctgttcagaaccttctga

SEQ ID NO: 561 - DNA, 1299 bp, Homo Sapiens
atggagaggagacgcatcacctccgctgctcgccgctcctacgtctcctcaggggagatgatggtggggggcctggctcctggccgccgtctgggtcctggcacccgcctctccctggctcgaatgccccctccactcccgacccgggtggatttctccctggctggggcactcaatgctggcttcaaggagacccgggccagtgagcgggcagagatgatggagctcaatgaccgctttgccagctacatcgagaaggttcgcttcctggaacagcaaaacaaggcgctggctgctgagctgaaccagctgcgggccaaggagcccaccaagctggcagacgtctaccaggctgagctgcgagagctgcggctgcggctcgatcaactcaccgccaacagcgcccggctggaggttgagagggacaatctggcacaggacctggccactgtgaggcagaagctccaggatgaaaccaacctgaggctggaagccgagaacaacctggctgcctatagacaggaagcagatgaagccaccctggcccgtctggatctggagaggaagattgagtcgctggaggaggagatccggttcttgaggaagatccacgaggaggaggttcgggaactccaggagcagctggcccgacagcaggtccatgtggagcttgacgtggccaagccagacctcaccgcagccctgaaagagatccgcacgcagtatgaggcaatggcgtccagcaacatgcatgaagccgaagagtggtaccgctccaagtttgcagacctgacagacgctgctgcccgcaacgcggagctgctccgccaggccaagcacgaagccaacgactaccggcgccagttgcagtccttgacctgcgacctggagtctctgcgcggcacgaacgagtccctggagaggcagatgcgcgagcaggaggagcggcacgtgcgggaggcggccagttatcaggaggcgctggcgcggctggaggaagaggggcagagcctcaaggacgagatggcccgccacttgcaggagtaccaggacctgctcaatgtcaagctggccctggacatcgagatcgccacctacaggaagctgctagagggcgaggagaaccggatcaccattcccgtgcagaccttctccaacctgcagattcgagaaaccagcctggacaccaagtctgtgtcagaaggccacctcaagaggaacatcgtggtgaagaccgtggagatgcgggatggagaggtcattaaggagtccaagcaggagcacaaggatgtgatgtga

SEQ ID NO: 562 - DNA, 1554 bp, Homo Sapiens
atggcggccctaggccctagcagccagaatgtcactgaatacgtcgttcgagttcctaagaatacaaccaaaaaatataacatcatggcttttaatgcagccgacaaagtcaactttgctacgtggaatcaggctcggctggagcgggacttgagcaacaagaaaatctaccaagaggaggagatgcccgaatcgggcgcgggcagtgagttcaaccgcaagcttcgggaggaggctcggaggaagaagtacggcatcgtcctcaaggagttccggcccgaggaccagccctggctgctccgggtcaacggcaaatcaggcaggaagttcaagggcatcaagaagggaggcgtaacagagaacacgtcctactacatcttcacccagtgccccgacggggccttcgaggccttccccgtgcacaactggtacaatttcacaccgctggcccggcatcgcacgctcactgccgaggaggccgaggaggagtgggagaggaggaacaaggtgctgaaccacttcagcatcatgcagcagcggcggctcaaggatcaggaccaggacgaggatgaggaggagaaggagaaacgtggccgcaggaaggcgagcgagctgcgcatccacgacctggaggacgacctggagatgtcgtccgatgccagtgatgccagtggtgaggaggggggcagagtccccaaggccaagaagaaggcgccgctggccaagggcggcaggaaaaagaagaagaagaagggttcagacgacgaggccttcgaggacagcgatgatggggacttcgagggccaagaggtggactacatgtcagacggctccagtagctcccaagaagagcctgagagcaaggccaaggcgccgcagcaggaggaggggcccaagggtgtcgatgagcagagcgacagtagtgaggagagtgaggaggagaagccgcctgaggaggacaaggaggaggaggaggagaagaaggcacccaccccgcaggagaagaagcgcaggaaagacagcagcgaggagtcggacagctcagaggagagcgacattgacagcgaggcctcctcagccctcttcatggcgaagaagaagacgccacccaagagagagcggaagccgtcgggagggagctcaaggggcaacagccgcccaggcacgcccagcgcagagggtggcagcacctcctccaccctgcgggcggctgccagcaaactcgagcaagggaagcgggtgagcgagatgcctgcagccaagcggttgcggctggacacgggaccccagagcctgtctgggaagtcgacaccccagccaccatcaggcaagacaacacccaacagcggcgacgtgcaggtgactgaggatgccgtgcgccgctacctgacacggaagcccatgaccactaaggacctgctgaaaaagttccagaccaagaagacagggctgagcagcgagcagacagtgaacgtgttggcccagatcctcaagcgactcaaccccgagcgcaagatgatcaacgacaaaatgcacttctccctcaaggagtga

SEQ ID NO: 563 - DNA, 1926 bp, Homo Sapiens
atggccaaagccgcggcgatcggcatcgacctgggcaccacctactcctgcgtgggggtgttccaacacggcaaggtggagatcatcgccaacgaccagggcaaccgcaccacccccagctacgtggccttcacggacaccgagcggctcatcggggatgcggccaagaaccaggtggcgctgaacccgcagaacaccgtgtttgacgcgaagcggctgatcggccgcaagttcggcgacccggtggtgcagtcggacatgaagcactggcctttccaggtgatcaacgacggagacaagcccaaggtgcaggtgagctacaagggggagaccaaggcattctaccccgaggagatctcgtccatggtgctgaccaagatgaaggagatcgccgaggcgtacctgggctacccggtgaccaacgcggtgatcaccgtgccggcctacttcaacgactcgcagcgccaggccaccaaggatgcgggtgtgatcgcggggctcaacgtgctgcggatcatcaacgagcccacggccgccgccatcgcctacggcctggacagaacgggcaagggggagcgcaacgtgctcatctttgacctgggcgggggcaccttcgacgtgtccatcctgacgatcgacgacggcatcttcgaggtgaaggccacggccggggacacccacctgggtggggaggactttgacaacaggctggtgaaccacttcgtggaggagttcaagagaaaacacaagaaggacatcagccagaacaagcgagccgtgaggcggctgcgcaccgcctgcgagagggccaagaggaccctgtcgtccagcacccaggccagcctggagatcgactccctgtttgagggcatcgacttctacacgtccatcaccagggcgaggttcgaggagctgtgctccgacctgttccgaagcaccctggagcccgtggagaaggctctgcgcgacgccaagctggacaaggcccagattcacgacctggtcctggtcgggggctccacccgcatccccaaggtgcagaagctgctgcaggacttcttcaacgggcgcgacctgaacaagagcatcaaccccgacgaggctgtggcctacggggcggcggtgcaggcggccatcctgatgggggacaagtccgagaacgtgcaggacctgctgctgctggacgtggctcccctgtcgctggggctggagacggccggaggcgtgatgactgccctgatcaagcgcaactccaccatccccaccaagcagacgcagatcttcaccacctactccgacaaccaacccggggtgctgatccaggtgtacgagggcgagagggccatgacgaaagacaacaatctgttggggcgcttcgagctgagcggcatccctccggcccccaggggcgtgccccagatcgaggtgaccttcgacatcgatgccaacggcatcctgaacgtcacggccacggacaagagcaccggcaaggccaacaagatcaccatcaccaacgacaagggccgcctgagcaaggaggagatcgagcgcatggtgcaggaggcggagaagtacaaagcggaggacgaggtgcagcgcgagagggtgtcagccaagaacgccctggagtcctacgccttcaacatgaagagcgccgtggaggatgaggggctcaagggcaagatcagcgaggcggacaagaagaaggttctggacaagtgtcaagaggtcatctcgtggctggacgccaacaccttggccgagaaggacgagtttgagcacaagaggaaggagctggagcaggtgtgtaaccccatcatcagcggactgtaccagggtgccggtggtcccgggcctggcggcttcggggctcagggtcccaagggagggtctgggtcaggccctaccattgaggaggtggattag

SEQ ID NO: 564 - DNA, 1278 bp, Homo Sapiens
atggcgagtaaagagatgtttgaagatactgtggaggagcgtgtcatcaatgaagaatataaaatctggaagaagaatacaccgtttctatatgacctggttatgacccatgctcttcagtggcccagtcttaccgttcagtggcttcctgaagtgactaaacctgaaggaaaagattatgcccttcattggctagtgctggggactcatacgtctgatgagcagaatcatctggtggttgctcgagtacatattcccaatgatgatgcacagtttgatgcttcccattgtgacagtgacaagggtgaatttggtggctttggttctgtaacaggaaaaattgaatgtgaaattaaaatcaatcacgaaggagaagtaaaccgtgctcgttacatgccgcagaatcctcacatcattgctacaaaaacaccatcttctgatgtgttggtttttgactatacaaaacaccctgctaaaccagacccaagtggagaatgtaatcctgatctcagattaagaggtcaccagaaggaaggctatggtctctcctggaattcaaatttgagtggacatctcctaagtgcatctgatgaccatactgtttgtctgtgggatataaacgcaggaccaaaagaaggcaaaattgtggatgctaaagccatctttactggccactcagctgttgtagaggatgtggcctggcacctgctgcacgagtcattgtttggatctgttgctgatgatcagaaacttatgatatgggacaccaggtccaataccacctccaagccgagtcacttggtggatgcgcacactgccgaagtcaactgcctctcattcaatccctacagcgaatttattctagccaccggctctgcggataagaccgtagctttatgggatctgcgtaacttaaaattaaaactccataccttcgaatctcataaagatgaaattttccaggtccactggtctccacataatgaaactattctggcttcaagtggtactgaccgccgcctgaatgtgtgggatttaagtaaaattggggaagaacaatcagcagaagatgcagaagatgggcctccagaactcctgtttattcatggaggacacactgctaagatttcagattttagctggaaccccaatgagccttgggtcatttgctcagtgtctgaggataacatcatgcagatatggcaaatggctgaaaatatttacaatgatgaagagtcagatgtcacgacatccgaactggagggacaaggatcttaa

SEQ ID NO: 565 - DNA, 3357 bp, Homo Sapiens
atgagcgtggaggcgtacgggcccagctcgcagactctcactttcctggacacggaggaggccgagctgcttggcgccgacacacagggctccgagttcgagttcaccgactttactcttcctagccagacgcagacgccccccggcggccccggcggcccgggcggtggcggcgcgggaggcccgggcggcgcgggcgcgggcgctgcggcgggacagctcgacgcgcaggttgggcccgaaggcatcctgcagaacggggctgtggacgacagtgtagccaagaccagccagttgttggctgagttgaacttcgaggaagatgaagaagacacctattacacgaaggacctccccatacacgcctgcagttactgtggaatacacgatcctgcctgcgtggtttactgtaataccagcaagaagtggttctgcaacggacgtggaaatacttctggcagccacattgtaaatcaccttgtgagggcaaaatgcaaagaggtgaccctgcacaaggacgggcccctgggggagacagtcctggagtgctacaactgcggctgtcgcaacgtcttcctcctcggcttcatcccggccaaagctgactcagtggtggtgctgctgtgcaggcagccctgtgccagccagagcagcctcaaggacatcaactgggacagctcgcagtggcagccgctgatccaggaccgctgcttcctgtcctggctggtcaagatcccctccgagcaggagcagctgcgggcacgccagatcacggcacagcagatcaacaagctggaggagctgtggaaggaaaacccttctgccacgctggaggacctggagaagccgggggtggacgaggagccgcagcatgtcctcctgcggtacgaggacgcctaccagtaccagaacatattcgggcccctggtcaagctggaggccgactacgacaagaagctgaaggagtcccagactcaagataacatcactgtcaggtgggacctgggccttaacaagaagagaatcgcctacttcactttgcccaagactgactctgacatgcggctcatgcagggggatgagatatgcctgcggtacaaaggggaccttgcgcccctgtggaaagggatcggccacgtcatcaaggtccctgataattatggcgatgagatcgccattgagctgcggagcagcgtgggtgcacctgtggaggtgactcacaacttccaggtggattttgtgtggaagtcgacctcctttgacaggatgcagagcgcattgaaaacgtttgccgtggatgagacctcggtgtctggctacatctaccacaagctgttgggccacgaggtggaggacgtaatcatcaagtgccagctgcccaagcgcttcacggcgcagggcctccccgacctcaaccactcccaggtttatgccgtgaagactgtgctgcaaagaccactgagcctgatccagggcccgccaggcacggggaagacggtgacgtcggccaccatcgtctaccacctggcccggcaaggcaacgggccggtgctggtgtgtgctccgagcaacatcgccgtggaccagctaacggagaagatccaccagacggggctaaaggtcgtgcgcctctgcgccaagagccgtgaggccatcgactccccggtgtcttttctggccctgcacaaccagatcaggaacatggacagcatgcctgagctgcagaagctgcagcagctgaaagacgagactggggagctgtcgtctgccgacgagaagcggtaccgggccttgaagcgcaccgcagagagagagctgctgatgaacgcagatgtcatctgctgcacatgtgtgggcgccggtgacccgaggctggccaagatgcagttccgctccattttaatcgacgaaagcacccaggccaccgagccggagtgcatggttcccgtggtcctcggggccaagcagctgatccttgtaggcgaccactgccagctgggcccagtggtgatgtgcaagaaggcggccaaggccgggctgtcacagtcgctcttcgagcgcctggtggtgctgggcatccggcccatccgcctgcaggtccagtaccggatgcaccctgcactcagcgccttcccatccaacatcttctacgagggctccctccagaatggtgtcactgcagcggatcgtgtgaagaagggatttgacttccagtggccccaacccgataaaccgatgttcttctacgtgacccagggccaagaggagattgccagctcgggcacctcctacctgaacaggaccgaggctgcgaacgtggagaagatcaccacgaagttgctgaaggcaggcgccaagccggaccagattggcatcatcacgccctacgagggccagcgctcctacctggtgcagtacatgcagttcagcggctccctgcacaccaagctctaccaggaggtggagatcgccagtgtggacgcctttcagggacgcgagaaggacttcatcatcctgtcctgtgtgcgggccaacgagcaccaaggcattggctttttaaatgaccccaggcgtctgaacgtggccctgaccagagcaaggtatggcgtcatcattgtgggcaacccgaaggcactatcaaagcagccgctctggaaccacctgctgaactactataaggagcagaaggtgctggtggaggggccgctcaacaacctgcgtgagagcctcatgcagttcagcaagccacggaagctggtcaacactatcaacccgggagcccgcttcatgaccacagccatgtatgatgcccgggaggccatcatcccaggctccgtctatgatcggagcagccagggccggccttccagcatgtacttccagacccatgaccagattggcatgatcagtgccggccctagccacgtggctgccatgaacattcccatccccttcaacctggtcatgccacccatgccaccgcctggctattttggacaagccaacgggcctgctgcagggcgaggcaccccgaaaggcaagactggtcgtgggggacgccagaagaaccgctttgggcttcctggacccagccagactaacctccccaacagccaagccagccaggatgtggcgtcacagcccttctctcagggcgccctgacgcagggctacatctccatgagccagccttcccagatgagccagcccggcctctcccagccggagctgtcccaggacagttaccttggtgacgagtttaaatcacaaatcgacgtggcgctctcacaggactccacgtaccagggagagcgggcttaccagcatggcggggtgacggggctgtcccagtattaa

SEQ ID NO: 566 - DNA, 2010 bp, Homo Sapiens
atggaaaaatgttcagtgggaggattagagttgactgaacagactcctgctttattagggaatatggccatggcaactagtctcatggacataggggattcatttggtcatccagcttgtcctttagtcagtagatctaggaactcaccagtggaagatgatgatgatgatgatgatgttgtgtttattgaatctatacaacctccttcaatttctgctccagcaatagctgatcaaagaaacttcatatttgcatcatcaaaaaatgaaaagcctcaaggaaattattctgtaattcctccttcttcaagagatttggcatctcagaaaggaaatataagtgagacaattgttattgatgatgaagaggacatagaaacaaatggaggagcagagaaaaagtcttcctgttttatcgaatggggacttcctggaactaaaaacaaaaccaacgatttggatttctccacttccagtctttcaagaagtaagaccaagactggagtaagaccttttaaccctggtagaatgaatgtggcaggagacttatttcagaatggagaatttgcaactcatcatagtcctgattcttggatctcccagtcagcttcatttcccagtaatcagaaacagccaggggtggattctttatcaccagtggccttacttcgtaagcagaatttccagcctacagcccaacaacaacttactaaaccagctaaaatcacttgtgcaaattgcaaaaagcctttacagaagggacagacagcttatcaacgaaaaggatcagctcacctcttttgctctaccacctgcctttcttccttctctcataaacgtactcaaaacacacgaagcataatatgtaaaaaagatgcatctacaaagaaggctaatgtcattcttccagtagaatcaagcaaatccttccaagaattttatagtacatcttgtttgtctccctgtgaaaacaactggaatcttaaaaaaggagtttttaataagtcaagatgtacaatttgtagtaaattagcagagattcgccatgaagtcagcgtaaataatgtaacacataaactgtgcagtaaccattgctttaataagtacagattggccaatggtctaataatgaactgctgtgaacactgtggagagtacatgcctagtaagagtactggaaacaacatcctggtgattggaggtcagcagaagagattttgctgccaaagttgtattaacgaatataaacagatgatggaaacaaaatcaaaaaaattaacagcatcagaaaatagaaaaaggaatgcttttagagaagaaaatgagaaacaattatatggatcgtcaaatacacttttgaaaaaaatagagggaatcccagaaaaaaaggaaaagacttcacagctacagctttcagtagaatgtggcacggatacattactgatccaagagaatgtgaatttacctccttcttccacgtcaaccatagctgatacatttcaagagcaactggaagagaaaaattttgaagactccattgtaccagttgtgctttccgcagatccaggtacgtggccccgaattttgaatattaaacaacgggacactcttgttgaaaatgttccgcctcaagtaagaaattttaactttccaaaagataatacagggaggaagttttcagaaacttattatacacggattcttccaaatggtgaaaaaaccactagatcctggttactttattcaacctcaaaagattctgtgttttgtctatattgcaaactctttggggaaggaaaaaatcaactgaaaaatgaaaatgggtgcaaagattggcaacatttatcacatattcttagtaaacatgaagaaagtgaaatgcacgtcaacaatagtgttaagtactcaaaattaaaatctgatctgaaaaaaaataaagctattgatgctgcagaacacagattatatgaaaatgagaaaaatgatggtgtgctgttgttgtacacgtaa

SEQ ID NO: 567 - DNA, 1749 bp, Homo Sapiens
atggctgaatttctagatgaccaggaaactcgactgtgtgacaactgcaaaaaagaaattcctgtgtttaactttaccatccatgagatccactgtcaaaggaacattggtatgtgtcctacctgtaaggaaccatttcccaaatctgacatggagactcacatggctgcagaacactgtcaggtgacctgcaaatgtaacaagaagttggagaagaggctgttaaagaagcatgaggagactgagtgccctttgcggcttgctgtctgccagcactgtgatttagaactttccattctcaaactgaaggaacatgaagattattgtggtgcccggacggaactatgtggcaactgtggtcgcaatgtccttgtgaaagatctgaagactcaccctgaagtttgtgggagagagggggaggaaaagagaaatgaggttgccatacctcctaatgcatatgatgaatcttggggtcaggatggaatctggattgcatcccaactcctcagacaaattgaggctctggacccacccatgaggctgccgcgaaggcccctgagagcctttgaatcagatgttttccacaatagaactaccaaccaaaggaacattacagcccaggtttcaattcagaataatctgtttgaagaacaagagaggcaggaaaggaatagaggccaacagccccccaaagagggtggtgaagagagtgcaaacttggacttcatgttggccctaagtctgcaaaatgaaggccaagcctccagtgtggcagagcaggacttctggagggccgtatgtgaggccgaccagtctcatggcggtcccaggtctctcagtgacataaagggtgcagctgacgagatcatgttgccttgtgaattttgtgaggagctctacccagaggaactgctgattgaccatcagacaagctgtaacccttcacgtgccttaccttcactcaatactggcagctcttcccccagaggggtggaggaacctgatgtcatcttccagaacttcttgcaacaggctgcaagtaaccagttagactctttgatgggcctgagcaattcacaccctgtggaggagagcatcattatcccatgtgaattctgtggggtacagctggaagaggaggtgctgttccatcaccaggaccagtgtgaccaacgcccagccactgcaaccaaccatgtgacagaggggattcctagactggattcccagcctcaagagacctcaccagagctgcccaggaggcgtgtcagacaccagggagacctgtcttctggttacctggatgatactaagcaggaaacagctaatgggcccacctcctgtctgcctcccagccgacccattaacaatatgacagctacctataaccagctatcgagatcaacatcaggccccagacctgggtgccagcccagctctccttgtgtgccgaagctcagcaactcagacagccaggacatccaggggcggaatcgagacagccagaatggggccatagcccctgggcacgtttcagtgattcgccctcctcaaaatctctacccagaaaacattgtgccctctttctcccctgggccttcagggagatacggagctagtggtaggagtgaaggtggcaggaattcccgggtcacccctgcagctgccaactaccgcagcagaactgcaaaggcaaagccttccaagcaacagggagctggggatgcagaagaggaagaggaggagtaa

SEQ ID NO: 568 - DNA, 918 bp, Homo Sapiens
atggatttatcaggagtgaaaaagaagagcttgctaggagtcaaagaaaataataaaaagtccagcactagggctccttcacctaccaaacgcaaagaccgctcagatgagaagtccaaggatcgctcaaaagataaaggggccaccaaggagtcgagtgagaaggatcgcggccgggacaaaacccgaaagaggcgcagcgcttccagtggtagcagcagtaccaggtctcggtccagctcgacttccagctcaggctccagcaccagcactggctcaagcagtggctccagctcttcctcagcatccagccgctcaggaagctccagcacctcccgcagctccagctctagcagctcttctggctctccaagtccttctcggcgcagacacgacaacaggaggcgctcccgctccaaatccaaaccacctaaaagagatgaaaaggagaggaaaaggcggagcccatctcctaagcccaccaaagtgcacattgggagactcacccggaatgtgacaaaggatcacatcatggagatattttccacctatgggaaaattaaaatgattgacatgcccgtggaaaggatgcatccccatctgtccaaaggctatgcgtacgtagagtttgagaatccagatgaagccgagaaggcgctgaagcacatggatggaggacaaattgatggccaggagatcactgccaccgccgtgctggccccctggcctaggccaccccccaggagattcagccctcccaggagaatgttgccaccaccgcctatgtggcgcaggtctcccccacggatgaggagaaggtcccgctccccgaggcgcaggtcccccgtgcgccggagatcacggtccccgggccgccgccgccacaggagccgctccagctccaactcctcccgataa

SEQ ID NO: 569 - DNA, 1386 bp, Homo Sapiens
atgagccggcaggtggtccgctccagcaagttccgccacgtgtttggacagccggccaaggccgaccagtgctatgaagatgtgcgcgtctcacagaccacctgggacagtggcttctgtgctgtcaaccctaagtttgtggccctgatctgtgaggccagcgggggaggggccttcctggtgctgcccctgggcaagactggacgtgtggacaagaatgcgcccacggtctgtggccacacagcccctgtgctagacatcgcctggtgcccgcacaatgacaacgtcattgccagtggctccgaggactgcacagtcatggtgtgggagatcccagatgggggcctgatgctgcccctgcgggagcccgtcgtcaccctggagggccacaccaagcgtgtgggcattgtggcctggcacaccacagcccagaacgtgctgctcagtgcaggttgtgacaacgtgatcatggtgtgggacgtgggcactggggcggccatgctgacactgggcccagaggtgcacccagacacgatctacagtgtggactggagccgagatggaggcctcatttgtacctcctgccgtgacaagcgcgtgcgcatcatcgagccccgcaaaggcactgtcgtagctgagaaggaccgtccccacgaggggacccggcccgtgcgtgcagtgttcgtgtcggaggggaagatcctgaccacgggcttcagccgcatgagtgagcggcaggtggcgctgtgggacacaaagcacctggaggagccgctgtccctgcaggagctggacaccagcagcggtgtcctgctgcccttctttgaccctgacaccaacatcgtctacctctgtggcaagggtgacagctcaatccggtactttgagatcacttccgaggcccctttcctgcactatctctccatgttcagttccaaggagtcccagcggggcatgggctacatgcccaaacgtggcctggaggtgaacaagtgtgagatcgccaggttctacaagctgcacgagcggaggtgtgagcccattgccatgacagtgcctcgaaagtcggacctgttccaggaggacctgtacccacccaccgcagggcccgaccctgccctcacggctgaggagtggctggggggtcgggatgctgggcccctcctcatctccctcaaggatggctacgtacccccaaagagccgggagctgagggtcaaccggggcctggacaccgggcgcaggagggcagcaccagaggccagtggcactcccagctcggatgccgtgtctcggctggaggaggagatgcggaagctccaggccacggtgcaggagctccagaagcgcttggacaggctggaggagacagtccaggccaagtag

SEQ ID NO: 570 - DNA, 249 bp, Homo Sapiens
atggcctttaccctgtactcactgctgcaggcagccctgctctgcgtcaacgccatcgcagtgctgcacgaggagcgattcctcaagaacattggctggggaacagaccagggaattggtggatttggagaagagccgggaattaaatcacagctaatgaaccttattcgatctgtaagaaccgtgatgagagtgccattgataatagtaaactcaattgcaattgtgttacttttattatttggatga

SEQ ID NO: 571 - DNA, 2106 bp, Homo Sapiens
atggggcttcctgaggagcgggtccggagcggcagcgggagccggggccaggaggaagctggagccggaggccgggcgcggagttggtctccgccgcccgaggtcagccgctccgcgcacgtcccctcgctgcagcgctaccgcgagctgcaccggcgctccgtggaggagccgcgggaattctggggagacattgccaaggaattttactggaagactccatgccctggcccattccttcggtacaactttgatgtgactaaagggaaaatcttcattgagtggatgaaaggagcaactaccaacatctgctacaatgtactggatcgaaatgtccatgagaaaaagcttggagataaagttgctttttactgggagggcaatgagccaggggagaccactcagatcacataccatcagcttctggtccaagtgtgtcagttcagcaatgttctccgaaaacagggcattcagaagggggaccgagtggccatctacatgcctatgatcccagagcttgtggtggccatgctggcatgtgcccgcattggggctttgcactccattgtgtttgcaggcttctcttcagagtctctatgtgaacggatcttggattccagctgcagtcttctcatcactacagatgccttctacaggggggaaaagcttgtgaacctgaaggagctggctgacgaggccctgcagaagtgtcaggagaagggtttcccagtaagatgctgcattgtggtcaagcacctggggcgggcagagctcggcatgggtgactccaccagccagtcccccccaattaagaggtcatgcccagatgtgcagatctcatggaaccaagggattgacttgtggtggcatgagctcatgcaagaggcaggggatgagtgtgagcccgagtggtgtgatgccgaggacccactcttcatcctgtacaccagtggctccacaggcaaacccaagggtgtggttcacacagttgggggctacatgctctatgtagccacaaccttcaagtatgtgtttgacttccatgcagaggatgtgttctggtgcacggcagacattggttggatcactggtcattcctacgtcacctatgggccactggccaatggtgccaccagtgttttgtttgaggggattcccacatatccggacgtgaaccgcctgtggagcattgtggacaaatacaaggtgaccaagttctacacagcacccacagccatccgtctgctcatgaagtttggagatgagcctgtcaccaagcatagccgggcatccttgcaggtgttaggcacagtgggtgaacccatcaaccctgaggcctggctatggtaccaccgggtggtaggtgcccagcgctgccccatcgtggacaccttctggcaaacagagacaggtggccacatgttgactccccttcctggtgccacacccatgaaacccggttctgctactttcccattctttggtgtagctcctgcaatcctgaatgagtccggggaagagttggaaggtgaagctgaaggttatctggtgttcaagcagccctggccagggatcatgcgcacagtctatgggaaccacgaacgctttgagacaacctactttaagaagtttcctggatactatgttacaggagatggctgccagcgggaccaggatggctattactggatcactggcaggattgatgacatgctcaatgtatctggacacctgctgagtacagcagaggtggagtcagcacttgtggaacatgaggctgttgcagaggcagctgtggtgggccaccctcatcctgtgaagggtgaatgcctctactgctttgtcaccttgtgtgatggccacaccttcagccccaagctcaccgaggagctcaagaagcagattagagaaaagattggccccattgccacaccagactacatccagaatgcacctggcttgcctaaaacccgctcagggaaaatcatgaggcgagtgcttcggaagattgctcagaatgaccatgacctcggggacatgtctactgtggctgacccatctgtcatcagtcacctcttcagccaccgctgcctgaccatccagtga

SEQ ID NO: 572 - DNA, 1692 bp, Homo Sapiens
atgctggaggaagcgggcgaggtgctggagaacatgctgaaggcgtcttgtctgccgctcggcttcatcgtcttcctgcccgctgtgctgctgctggtggcgccgccgctgcctgccgccgacgccgcgcacgagttcaccgtgtaccgcatgcagcagtacgacctgcagggccagccctacggcacacggaatgcagtgctgaacacggaggcgcgcacgatggcggcggaggtgctgagccgccgctgcgtgctcatgcggctactggacttctcctacgagcagtaccagaaggccctgcggcagtcggcgggcgccgtggtcatcatcctgcccagggccatggccgccgtgccccaggacgtcgtccggcaattcatggagatcgagccggagatgctggccatggagaccgccgtccccgtgtactttgccgtggaggacgaggccctgctgtctatctacaagcagacccaggctgcctccgcctcccagggctccgcctctgctgctgaagtactgctgcgcacggccactgccaacggcttccagatggtcaccagcggggtacagagcaaggccgtgagtgactggctgattgccagcgtggaggggcggctgacggggctgggcggagaggaccttcccaccatcgtcatcgtggcccactacgacgcctttggagtggccccctggctgtcgctgggcgcggactccaacgggagcggcgtctctgtgctgctggagctggcacgcctcttctcccggctctacacctacaagcgcacgcacgccgcctacaacctcctgttctttgcgtctggaggaggcaagtttaactaccagggaaccaagcgctggctggaagacaacctggaccacacagactccagcctgcttcaggacaatgtggccttcgtgctgtgcctggacaccgtgggccggggcagcagcctgcacctgcacgtgtccaagccgcctcgggagggcaccctgcagcacgccttcctgcgggagctggagacggtggccgcgcaccagttccctgaggtacggttctccatggtgcacaagcggatcaacctggcggaggacgtgctggcctgggagcacgagcgcttcgccatccgccgactgcccgccttcacgctgtcccacctggagagccaccgtgacggccagcgcagcagcatcatggacgtgcggtcccgggtggattctaagaccctgacccgtaacacgaggatcattgcagaggccctgactcgagtcatctacaacctgacagagaaggggacacccccagacatgccggtgttcacagagcagatgcagatccagcaggagcagctggactcggtgatggactggctcaccaaccagccgcgggccgcgcagctggtggacaaggacagcaccttcctcagcacgctggagcaccacctgagccgctacctgaaggacgtgaagcagcaccacgtcaaggctgacaagcgggacccagagtttgtcttctacgaccagctgaagcaagtgatgaatgcgtacagagtcaagccggccgtctttgacctgctcctggctgttggcattgctgcctacctcggcatggcctacgtggctgtccagcacttcagcctcctctacaagaccgtccagaggctgctcgtgaaggccaagacacagtga

SEQ ID NO: 573 - DNA, 1755 bp, Homo Sapiens
atgaagatgatgctggtgcgccggttccgcgtgctcatcctgatggtgttcctggtggcctgcgcgctgcacatcgccctggacctgctgcccaggctggagcgacgcggcgcgcggccctcgggggagcccggctgttcgtgcgcgcagcccgccgccgaggtggccgcgcccggctgggcccaggttcggggccgccccggggagcccccggccgcctcctccgccgccggcgacgcgggctggcccaacaagcacacgctccgcatcctgcaggacttcagctccgacccctcctccaacctctcgtcccactcgctggagaaactgccgcccgcggccgagccggccgagcgcgccttgcgggggcgggatcccggcgccctaagaccccacgaccccgcgcaccggccgctgctgcgagaccccggcccgcgtcggtccgagtcgccccccggccccggcggagacgcctccctcctggccaggctgttcgagcacccgctttaccgggtggcggttccgccgctcacggaggaggacgtcctgttcaatgtgaacagcgacaccaggctcagccccaaagcggcggagaacccggactggccgcatgcgggtgctgaaggtgcagaattcctctcccccggggaggcggccgtggactcctatcccaactggctcaagttccacattggtatcaaccggtacgagctgtactccagacacaacccggccatcgaggccctgctgcacgacctcagctcccagaggatcaccagcgtggccatgaagtcggggggcacgcagctgaagctcatcatgaccttccagaattacgggcaagcgctgttcaaacccatgaaacaaacgagggagcaggagacaccccctgactttttttatttctctgactacgagaggcacaatgcggagattgctgccttccacctggacaggatcctggacttccgccgggtccctcccgtggccggcaggatggtcaacatgaccaaggagatccgggacgtcacacgggacaagaagctctggaggaccttcttcatctctccagccaacaacatctgcttctacggcgagtgttcctactactgctccacggagcacgccctgtgcgggaagccagaccagatcgagggctcgctggcggccttcctgcccgacctgtccctggccaagaggaagacctggcggaacccttggcggcgttcctaccacaagcgcaagaaggccgagtgggaggtggaccctgactactgcgaggaggtgaagcagacaccgccctacgacagcagccaccgcatcctggacgtcatggacatgacgatcttcgacttcctcatgggaaacatggaccgtcaccactacgagacttttgagaagtttgggaatgaaacgttcatcatccacttagacaatggaagagggtttgggaagtattcgcacgacgagctctccatcctggtgccgctacagcagtgctgcaggatccggaagtccacctacctgcgtctgcagctcctggccaaggaggagtacaagctgagcctgctgatggccgagtctctgcggggggaccaggtggcacccgtgctgtaccagccgcacctggaggccctggaccggcggctccgcgtcgtgctaaaggccgtccgggactgcgtggagaggaacgggctccacagcgtggtggatgacgacctggacactgagcacagagccgcctcggcgaggtag

SEQ ID NO: 574 - DNA, 1896 bp, Homo Sapiens
atgaacagctcggacgaagagaagcagctgcagctcattaccagtctgaaggagcaagcaataggcgaatatgaagaccttagagcagagaaccagaaaacaaaggagaagtgtgacaaaattaggcaagaacgagatgaagccgttaaaaaactggaagaatttcagaaaatttctcacatggtcatagaggaagttaatttcatgcagaaccatcttgaaatagagaagacttgtcgagaaagtgctgaagctttggcaacaaagctaaataaagaaaataaaacgttgaaaagaatcagcatgttgtacatggccaagctgggaccagatgtaataactgaagagataaacattgatgatgaagattcgactacagacacagacggtgccgccgagacttgtgtctcagtacagtgtcagaagcaaattaaagaacttcgagatcaaattgtatctgttcaggaggaaaagaagattttagccattgagctggaaaatctcaagagcaaactcgtagaagtaattgaagaagtaaataaagttaaacaagaaaagactgttttaaattcagaagttcttgaacagagaaaagtcttagaaaaatgcaatagagtgtccatgttagctgtagaagagtatgaggagatgcaagtaaacctggagctggagaaggaccttcgaaagaaagcagagtcatttgcacaagagatgttcattgagcaaaacaagctaaagagacaaagccaccttctgctgcagagctccatccctgatcagcagcttttgaaagctttagacgaaaatgcaaaactcacccagcaacttgaagaagagagaattcagcatcaacaaaaggtcaaagaattagaagagcaactagaaaatgaaacactccacaaagaaatacacaacctcaaacagcaactggagcttctagaggaagataaaaaggaattggaattgaaatatcagaattctgaagagaaagccagaaatttaaagcactctgttgatgaactccagaaacgagtgaaccagtctgagaattcagtacctccaccacctcctcctccaccaccacttccccctccacctcccaatcctatccgatccctcatgtccatgatccggaaacgatcccaccccagtggcagtggtgctaagaaagaaaaggcaactcaaccagaaacaactgaagaagtcacagatctaaagaggcaagcagttgaagagatgatggatagaattaaaaagggagttcatcttagacccgttaatcagacagccagaccgaagacaaagccagaatcttcgaaaggctgcgaaagtgcagtggatgaactaaaaggaatactggggacacttaacaaatccactagttcaagaagcttaaaatcccttgaccctgaaaacagtgaaactgagttagaaaggattttgcgtcgcagaaaggtgacagcagaagcagatagcagtagtccaactgggatattagccacctcagagtccaaatccatgccagtgttgggttctgtatccagtgtaacaaaaacagccttgaacaagaaaactctggaggcagaattcaacagcccgtcccccccaacacctgagccaggtgaagggccccgtaaattggaaggatgcacaagttccaaggttacgtttcagcctcccagtagcattggatgcaggaaaaaatacattgacggtgaaaaacaagccgaaccagttgtagttttagatcctgtttctacacatgaaccccaaaccaaagaccaggttgctgaaaaagatccaactcaacacaaggaggatgaaggcgaaattcaaccagaaaacaaagaagacagcattgaaaacgtgagagagacagacagctccaactgctga

SEQ ID NO: 575 - DNA, 2736 bp, Homo Sapiens
atggcccagctgttcctgcccctgctggcagccctggtcctggcccaggctcctgcagctttagcagatgttctggaaggagacagctcagaggaccgcgcttttcgcgtgcgcatcgcgggcgacgcgccactgcagggcgtgctcggcggcgccctcaccatcccttgccacgtccactacctgcggccaccgccgagccgccgggctgtgctgggctctccgcgggtcaagtggactttcctgtcccggggccgggaggcagaggtgctggtggcgcggggagtgcgcgtcaaggtgaacgaggcctaccggttccgcgtggcactgcctgcgtacccagcgtcgctcaccgacgtctccctggcgctgagcgagctgcgccccaacgactcaggtatctatcgctgtgaggtccagcacggcatcgatgacagcagcgacgctgtggaggtcaaggtcaaaggggtcgtctttctctaccgagagggctctgcccgctatgctttctccttttctggggcccaggaggcctgtgcccgcattggagcccacatcgccaccccggagcagctctatgccgcctaccttgggggctatgagcaatgtgatgctggctggctgtcggatcagaccgtgaggtatcccatccagaccccacgagaggcctgttacggagacatggatggcttccccggggtccggaactatggtgtggtggacccggatgacctctatgatgtgtactgttatgctgaagacctaaatggagaactgttcctgggtgaccctccagagaagctgacattggaggaagcacgggcgtactgccaggagcggggtgcagagattgccaccacgggccaactgtatgcagcctgggatggtggcctggaccactgcagcccagggtggctagctgatggcagtgtgcgctaccccatcgtcacacccagccagcgctgtggtgggggcttgcctggtgtcaagactctcttcctcttccccaaccagactggcttccccaataagcacagccgcttcaacgtctactgcttccgagactcggcccagccttctgccatccctgaggcctccaacccagcctccaacccagcctctgatggactagaggctatcgtcacagtgacagagaccctggaggaactgcagctgcctcaggaagccacagagagtgaatcccgtggggccatctactccatccccatcatggaggacggaggaggtggaagctccactccagaagacccagcagaggcccctaggacgctcctagaatttgaaacacaatccatggtaccgcccacggggttctcagaagaggaaggtaaggcattggaggaagaagagaaatatgaagatgaagaagagaaagaggaggaagaagaagaggaggaggtggaggatgaggctctgtgggcatggcccagcgagctcagcagcccgggccctgaggcctctctccccactgagccagcagcccaggaggagtcactctcccaggcgccagcaagggcagtcctgcagcctggtgcatcaccacttcctgatggagagtcagaagcttccaggcctccaagggtccatggaccacctactgagactctgcccactcccagggagaggaacctagcatccccatcaccttccactctggttgaggcaagagaggtgggggaggcaactggtggtcctgagctatctggggtccctcgaggagagagcgaggagacaggaagctccgagggtgccccttccctgcttccagccacacgggcccctgagggtaccagggagctggaggccccctctgaagataattctggaagaactgccccagcagggacctcagtgcaggcccagccagtgctgcccactgacagcgccagccgaggtggagtggccgtggtccccgcatcaggtgactgtgtccccagcccctgccacaatggtgggacatgcttggaggaggaggaaggggtccgctgcctatgtctgcctggctatgggggggacctgtgcgatgttggcctccgcttctgcaaccccggctgggacgccttccagggcgcctgctacaagcacttttccacacgaaggagctgggaggaggcagagacccagtgccggatgtacggcgcgcatctggccagcatcagcacacccgaggaacaggacttcatcaacaaccggtaccgggagtaccagtggatcggactcaacgacaggaccatcgaaggcgacttcttgtggtcggatggcgtccccctgctctatgagaactggaaccctgggcagcctgacagctacttcctgtctggagagaactgcgtggtcatggtgtggcatgatcagggacaatggagtgacgtgccctgcaactaccacctgtcctacacctgcaagatggggctggtgtcctgtgggccgccaccggagctgcccctggctcaagtgttcggccgcccacggctgcgctatgaggtggacactgtgcttcgctaccggtgccgggaaggactggcccagcgcaatctgccgctgatccgatgccaagagaacggtcgttgggaggccccccagatctcctgtgtgcccagaagacctgcccgagctctgcacccagaggaggacccagaaggacgtcaggggaggctactgggacgctggaaggcgctgttgatccccccttccagccccatgccaggtccctag

SEQ ID NO: 576 - DNA, 2424 bp, Homo Sapiens
atgaaggaatggaaatcaaagatggaaatttctgaagaaaagaagtcagcaagggctgcatccgaaaaactccaaagacaaatcacccaggaatgtgagttagttgaaaccagtaattctgaggacagattattgaagcactgggtaagccctttaaaggatgcaatgagacatctcccttcccaagagagcggtatcagggaaatgcatattatcccccagaaagccattgtgggagagattggccatggatgtaatgaaggagaaaaaatactttctgcaggagaaagctcccatagatatgaggttagtggccaaaacttcaaacagaagtcaggattaactgaacatcagaaaattcataatataaataagacctatgaatgtaaggaatgtgaaaaaaccttcaacaggagttcaaacctgatcatacatcagagaattcatacaggaaataagccatatgtgtgtaatgaatgtgggaaagactctaatcaaagttcaaatcttattatacatcagagaattcatacaggaaagaaaccttatatatgtcatgaatgtggaaaagacttcaatcagagctccaatctggtgagacataagcaaattcacagtggtgggaatccctatgagtgcaaagagtgtgggaaggcttttaagggaagctcaaaccttgtcctgcaccagagaatccacagtagggggaagccatatttatgcaataaatgtgggaaggctttcagtcaaagcacagatcttattatacatcacagaattcacactggagagaaaccctatgaatgttatgactgtggacagatgttcagtcaaagttcacaccttgtcccacatcagagaattcacactggagagaaacccctcaaatgtaatgaatgtgaaaaagccttcaggcagcattctcaccttactgaacaccagagactccacagtggagagaaaccctatgaatgtcacagatgtgggaagaccttcagtgggcgcacagcttttcttaaacatcagagattgcatgctggagagaaaattgaagaatgtgagaaaaccttcagcaaggatgaggagcttagggaagagcagagaattcaccaggaagagaaagcttattggtgtaatcagtgtggtaggaatttccagggcacctcagacctcatcagacatcaggtaactcatacaggagagaaaccatatgaatgtaaagaatgtgggaaaactttcaatcagagctcagaccttctgagacatcatagaattcacagtggagaaaaaccttgtgtatgtagcaaatgtgggaaatcttttaggggcagctcagatcttattagacaccatcgtgttcatactggagagaaaccctatgaatgtagtgaatgtgggaaagcctttagccagaggtcacaccttgttacacaccagaaaatccatactggagagaagccctatcagtgcactgaatgtgggaaagccttcaggcggcgttcactccttattcaacatcggagaattcatagtggtgagaaaccctatgaatgtaaggaatgtgggaagctcttcatttggcgcacagctttcctcaaacatcagagcctgcatactggagagaaacttgaatgtgagaaaaccttcagccaggatgaggagcttaggggagagcagaaaattcaccaggaagcgaaagcttattggtgtaatcagtgtggtagggctttccagggcagctcagacctcatcagacatcaggtaactcatacaagagagaaaccatatgaatgcaaagaatgtgggaaaactttcaatcagagctcagaccttctgagacatcatagaattcacagtggagaaaaaccttatgtatgcaacaaatgtgggaaatcttttaggggtagctcagatcttattaaacaccatcgtattcatactggagagaaaccctatgaatgtagtgaatgtgggaaagccttcagccagaggtcacaccttgctacacaccagaaaatccatactggagagaaaccctatcagtgcagtgaatgtgggaatgccttcaggcggcgttccctccttattcaacatcggagacttcatagtggtgagaaaccctatgaatgtaaggaatgtgggaaactcttcatgtggcacacggctttcctcaaacatcagagactgcatgctggagagaaacttgaagaatgtgagaaaaccttcagcaaggatgaggagcttagaaaagagcagagaactcaccaggaaaagaaagtttattggtgtaatcagtgtagtaggaccttccagggcagctcagatctcatcagacatcaggtaactcatacaagagagaaaccatatgaatgtaaagaatgtgggaaaactcaatcagagctcagaccttctgagacatcatag

SEQ ID NO: 577 - DNA, 780 bp, Homo Sapiens
atgagggacagaagagggcccctcggcacctgcctggcacaagtgcagcaggccggaggaggtgactcggacaaactatcatgcagccttaagaaaagaatgccggagggcccttggcctgcagatgcaccctcctggatgaataagcctgtggttgatggaaattcacaaagtgaggcattatcactggaaatgagaaaggatccgagcggggctggcctctggcttcacagtggcggcccagtgcttccatatgtgagagaatcagtaagaagaaatccagcctcagcagccactccgagcacagccgtgggtttgttccctgctccaacagagtgttttgctcgggtgtcctgcagtggtgttgaagctctggggcggcgagactggctgggaggagggcccagggccactgacggccacagaggacagtgccccaaaggagagcctcgggtgtcacgactgccacgccatcaaaaagtgccggaaatgggaagttttcaggatgacccaccaagtgcttttcccaagggtctgggctctgagttggaacccgcttgcctgcactccatcctgtctgcaacgctgcacgtgtatcccgaagtgctcctgagtgaggagacaaaacgcattttccttgaccgtttaaagcccatgttttcaaagcaaacaatagaattcaagaaaatgcttaaaagcacctcagatggtctgcagataacactggggttactggctctgcaaccttttgaattagcaaatacattatgccatagttaa

SEQ ID NO: 578 - DNA, 3360 bp, Homo Sapiens
atgaccgcggccgccgcctccaactgggggctgatcacgaacatcgtgaacagcatcgtaggggtcagtgtcctcaccatgcccttctgcttcaaacagtgcggcatcgtcctgggggcgctgctcttggtcttctgctcatggatgacgcaccagtcgtgcatgttcttggtgaagtcggccagcctgagcaagcggaggacctacgccggcctggcattccacgcctacgggaaggcaggcaagatgctggtggagaccagcatgatcgggctgatgctgggcacctgcatcgccttctacgtcgtgatcggcgacttggggtccaacttctttgcccggctgttcgggtttcaggtgggcggcaccttccgcatgttcctgctgttcgccgtgtcgctgtgcatcgtgctcccgctcagcctgcagcggaacatgatggcctccatccagtccttcagcgccatggccctcctcttctacaccgtgttcatgttcgtgatcgtgctctcctctctcaagcacggcctcttcagtgggcagtggctgcggcgggtcagctacgtccgctgggagggcgtcttccgctgcatccccatcttcggcatgtccttcgcctgccagtcccaggtgctgcccacctacgacagcctggatgagccgtcagtgaaaaccatgagctccatatttgcttcctcccttaatgtggtcaccaccttctacgtcatggtggggtttttcggctacgtcagcttcaccgaggccacggccggcaacgtgctcatgcactttccctccaacctggtgacggagatgctccgtgtgggcttcatgatgtcagtggctgtgggcttccccatgatgatcctgccatgcaggcaggccctgagcacgctgctgtgtgagcagcagcaaaaagatggcacctttgcagcagggggctacatgccccctctccggtttaaagcacttaccctctctgtggtgtttggaaccatggttggtggcatccttatccccaacgtggagaccatcctgggcctcacaggagcgaccatgggaagcctcatctgcttcatctgcccggcgctgatctacaagaaaatccacaagaacgcactttcctcccaggtggtgctgtgggtcggcctgggcgtcctggtggtgagcactgtcaccacactgtctgtgagcgaggaggtccccgaggacttggcagaggaagcccctggcggccggcttggagaggccgagggtttgatgaaggtggaggcagcgcggctctcagcccaggatccggttgtggccgtggctgaggatggccgggagaagccgaagctgccgaaggagagagaggagctggagcaggcccagatcaaggggcccgtggatgtgcctggacgggaagatggcaaggaggcaccggaggaggcacagctcgatcgccctgggcaagggattgctgtgcctgtgggcgaggcccaccgccacgagcctcctgttcctcacgacaaggtggtggtagatgaaggccaagaccgagaggtgccagaagagaacaaacctccatccagacacgcgggcggaaaggctccaggggtccagggccagatggcgccgcctctgcccgactcagaaagagagaaacaagagccggagcagggagaggttgggaagaggcctggacaggcccaggccttggaggaggcgggtgatcttcctgaagatccccagaaagttccagaagcagatggtcagccagctgtccagcctgcaaaggaggacctggggccaggagacaggggcctgcatcctcggccccaggcagtgctgtctgagcagcagaacggcctggcggtgggtggaggggaaaaggccaaggggggaccgccgccaggcaacgccgccggggacacagggcagcccgcagaggacagcgaccacggtgggaagcctcccctcccagcggagaagccggctccagggcctgggctgccgcccgagcctcgcgagcagagggacgtggagcgagcgggtggaaaccaggcggccagccagctggaggaagctggcagggcggagatgctggaccacgccgtcctgcttcaggtgatcaaagaacagcaggtgcagcaaaagcgcttgctggaccagcaggagaagctgctggcggtgatcgaggagcagcacaaggagatccaccagcagaggcaggaggacgaggaggataaacccaggcaggtggaggtgcatcaagagcccggggcagcggtgcccagaggccaggaggcccctgaaggcaaggccagggagacggtggagaatctgcctcccctgcctttggaccctgtcctcagagctcctgggggccgccctgctccatcccaggaccttaaccagcgctccctggagcactctgaggggcctgtgggcagagaccctgctggccctcctgacggcggccctgacacagagcctcgggcagcccaggccaagctgagagatggccagaaggatgccgcccccagggcagctggcactgtgaaggagctccccaagggcccggagcaggtgcccgtgccagaccccgccagggaagccgggggcccagaggagcgcctcgcagaggaattccctgggcaaagtcaggacgttactggcggttcccaagacaggaaaaaacctgggaaggaggtggcagccactggcaccagcattctgaaggaagccaactggctcgtggcagggccaggagcagagacgggggaccctcgcatgaagcccaagcaagtgagccgagacctgggccttgcagcggacctgcccggtggggcggaaggagcagctgcacagccccaggctgtgttacgccagccggaactgcgggtcatctctgatggcgagcagggtggacagcagggccaccggctggaccatggcggtcacctggagatgagaaaggcccgcgggggggaccatgtgcctgtgtcccacgagcagccgagaggcggggaggacgctgctgtccaggagcccaggcagaggccagagccagagctggggctcaaacgagctgtcccggggggccagaggccggacaatgccaagcccaaccgggacctgaaactgcaggctggctccgacctccggaggcgacggcgggaccttggccctcatgcagagggtcagctggccccgagggatggggtcatcattggccttaaccccctgcctgatgtccaggtgaacgacctccgtggcgccctggatgcccagctccgccaggctgcggggggagctctgcaggtggtccacagccggcagcttagacaggcgcctgggcctccagaggagtcctag

SEQ ID NO: 579 - DNA, 2481 bp, Homo Sapiens
atgccgccggcgagtggccccagcgtcctcgcgcggctgttgccgctgctggggctgctgctcggcagcgcctcccgggctcccggcaagtcgccgccggagccccccagcccgcaggagatcctgatcaaggtgcaggtgtatgtgagcggggagctggtgcccctggcccgggcctcagtggatgtgtttgggaaccggactctgctggcagctggcaccacagactcagagggtgtggccaccctgcccctcagttatcgcttgggcacctgggtgctggtcactgctgcccgccctggcttcctcaccaactctgtgccctggcgtgttgacaagctgcccttgtatgcgtctgtcagcctctacctgctccctgagcggccggccacgctcatcctctatgaggacctggtgcacattctcctaggctctcccggtgcccgctcccagcccttggtgcagttccagcgccgggctgcccgcctgcctgtcagctccacctacagccagctctgggcgtcacttacgcctgccagcacccagcaggaaatgcgggctttccctgccttcctgggcactgaggcctccagctcaggcaatggctcctggctggagctgatgcccctgactgctgtgagcgtgcacctgctgacaggtaatgggacagaggtgccgctctcaggccccattcacctgtccctgcccgtgccctccgagactcgtgccctcaccgtgggcaccagcattccagcctggagatttgaccccaagagtgggctgtgggtgcgcaatggcactggtgtaatccggaaggaaggccggcagctctactggaccttcgtctccccccagctggggtactgggtggccgccatggcctcccccacggctgggctggtcaccatcacgtcgggcatccaggacatcggcacctaccacaccatcttcttgctcaccatcctggcagccctggccctgctggtgcttatcctgctgtgtctgctcatctactactgccggaggcgctgcctgaagccgaggcaacagcaccgcaagctgcagctctcggggccctctgacggtaacaaacgagaccaggccacctcgatgtcccagctccacctcatctgtgggggacccctggaacccgccccgtcgggggaccccgaggctccgcctccaggccccctccactcggccttctccagctcccgggacttggcctcctcccgggatgacttcttccgcaccaagccgcgctctgccagccgcccggccgccgagccttcgggtgcccgcgggggcgagagcgccgggctcaagggcgctcgctcggccgagggccccggcgggctggagcccggcctagaggagcaccggcgggggccctcgggggctgcggccttcctgcacgagccgccctcgccgccgccgcccttcgaccactacctgggccacaagggggcggccgagggcaagacccccgacttcctgctgtcgcagtcggtggaccagctggcgcggccgccgtcgctgggccaggcggggcagctcatcttctgcggctccatcgaccacctcaaggacaacgtctaccgcaacgtcatgcccaccctggtgatccccgcgcactacgtgcgcctcggcggcgaggcgggcgccgccggcgtgggcgacgagccggccccgccggagggcacggcacccggcccggcgcgcgcttttccccagcccgacccccagcgcccgcagatgccgggccactcgggcccggggggcgagggcggcgggggcggcggcgagggctggggggccgggcgcgcggcgcccgtcagtggctcagtcaccatccctgtgctattcaacgagtccaccatggcgcagctcaacggggagctgcaggccctgaccgagaagaagctgctggaactgggcgtgaagccgcacccgcgcgcctggttcgtgtccctcgacgggcgctccaactcgcaagtgcgccactcttacatcgacctgcaggcgggcggcggggcacgcagcaccgacgccagcctggactcgggcgtagatgtccacgaggcgcggcccgcgcgccgccggcccgcgagggaggagcgggagcgcgccccgcctgccgcgccgccgccgccgcccgcgcccccgcgcctggcgctcagcgaggacacggagcccagcagcagcgagagccgcacgggcctctgctctccggaggacaactcgctgacgccgctgctggacgaggtggcggcgcccgagggccgggcggccacggtaccccgggggcggggccgcagccgcggggacagctcccgcagcagcgccagcgagctgcggcgcgactcgctcaccagcccggaggacgagctgggggcggaggtgggcgacgaggcgggagacaagaagagcccgtggcagcggcgggaggagcggccgctgatggtgttcaacgtcaagtag

SEQ ID NO: 580 - DNA, 7854 bp, Homo Sapiens
atgctgactgatagcggaggcggcggcacctcctttgaggaggacctggactctgtggctccgcgatccgccccagctggggcctcggagccgcctccgccgggaggggtcggtctggggatccgcaccgtgaggctctttggggaggccgggccagcgtcgggagtcggcagcagcggcggcggcggcagcggcagcggtacgggcggaggggacgcggcgctggatttcaagttggcggctgccgtgctgaggaccgggggtggaggtggtgcctctggcagtgacgaggacgaagtgtccgaggttgaatcatttattttggaccaagaagatctggataacccagtgcttaaaacaacatcagagatattcttatcaagtactgcagaaggagcagacttacgcactgtggatccagagacacaggcacgactagaagcattgctagaagcagcaggaattggcaaattgtcaactgctgatggtaaagcttttgcagatcctgaggtactccggagactgacatcctcagttagttgtgcactggatgaagctgctgctgcactgacacggatgaaagcagaaaacagccacaatgcaggacaagtggacactcgcagtctagcagaagcttgttcagatggggatgttaatgctgttcgtaaattgctagatgaaggcagaagtgtaaatgaacatacagaagaaggagaaagcctgctgtgtttggcttgttcagcagggtattatgaattagcacaagtattgcttgctatgcatgctaatgttgaagatcgagggaataaaggagacataactcccctgatggcagcttccagtggaggttacttagatattgtgaaattattacttcttcatgatgctgatgtcaactcccagtctgcaacaggaaacactgcgctaacttatgcatgtgctggaggatttgttgacattgttaaagtgctccttaatgaaggtgcaaatatagaagatcataatgaaaatggacatactcccttaatggaagcagccagtgcaggtcatgtggaagttgcaagagttcttttagatcatggtgcaggcatcaacactcattctaatgaattcaaagaaagtgctctaacacttgcttgctacaaaggccatttggatatggttcgctttctacttgaagctggtgcagatcaagagcacaaaacagatgagatgcacactgccttaatggaggcctgcatggatggacatgtagaggtggcacgtttgcttttggatagtggtgctcaagtgaacatgcctgcagattcatttgaatctccattgacgctagctgcctgtggaggacatgttgaattggcagctctacttattgaaaggggagcaaatcttgaagaagttaatgatgaaggatacactcccttgatggaagctgcccgggaaggacatgaagaaatggtggcactactcttagcacaaggagcaaatataaatgcccagacagaagaaactcaagaaactgctcttactttggcttgctgtggaggattttctgaagttgcagactttcttattaaggcaggggctgatatagaacttggctgctccacacctctgatggaggcatctcaggagggacacctggaattggttaaatatttgctggcttctggcgctaatgtgcatgctacaacagcaacaggagacacagccttaacctatgcttgtgaaaatggacatacggatgttgcagatgttttacttcaagcaggggctgatttagaacatgaatctgaaggtggaagaacacctttgatgaaagctgcaagagctggtcatttgtgcactgtgcagtttcttattagcaaaggtgccaatgttaacagggctacagccaataatgatcatacagtagtgtcgctggcatgtgcaggaggccacctggcagttgttgagcttctcttggctcatggggctgaccctactcatcgactcaaggatggttcaacaatgctcattgaagctgcaaagggtggccatactaatgtagtttcttatctgttggattatccaaataatgttctgtcagttcccaccacagatgtgtctcagctccctccaccttctcaagatcagtctcaggtgccacgtgtgccaacgcatacacttgccatggttgtacctccccaggaacctgacagaacttcacaggagaactctcctgcccttttaggagtgcaaaaaggtacatccaagcagaagtccagttccctccaggtagcagatcaggacctactgccatcttttcacccataccagcctttggagtgcatagtagaggagactgaaggcaagctgaatgaactgggacaaagaattagtgctattgaaaaagcacagcttaagtcactggagttaattcaaggtgaacctctgaacaaagataagatagaagaacttaaaaagaacagagaagagcaagtccagaagaagaagaaaatattgaaagaactgcagaaagtggaaaggcagttgcagatgaaaacacagcagcaatttaccaaagaatacttggaaaccaaaggtcagaaagacacagtgtctctacaccaacagtgctctcatagaggagtcttcccagaaggggaaggagatggtagtctcccagaggatcacttttcagagttacctcaggttgacacaatcttatttaaagataatgatgttgatgatgagcaacagtctccaccatcggcagaacagattgattttgtcccagtccagcctttatcatctccacagtgtaacttttccagtgacttaggttctaatgggacaaattctcttgaacttcagaaagtatcaggtaatcagcagattgtaggacagcctcagattgctattactggacatgatcaggggctgttagttcaagaaccagatggactaatggttgcaactccagctcagacgcttaccgacactcttgatgacctgatagcagctgtgagtaccagagtgcccactggttccaacagttcttctcagaccacagagtgtcttacacctgaatcctgttcgcagactacaagcaatgtggcttcccaatcgatgcctcctgtgtatccttcagttgacattgatgcacatactgagagcaatcatgacacagcattaacactagcttgtgcaggtggtcatgaagaacttgtatctgtgctcattgcacgggatgccaaaattgaacacagagacaaaaaaggtttcacaccactaatcctggcagcaacagcagggcatgttggagttgttgaaatccttttggataaaggtggagatatagaagcacagtctgaacgaactaaggatactccgctttcattggcatgttctggtggacgtcaggaggtggtagacttgctgctggctcgaggtgcaaataaagaacataggaacgtatctgattatacaccactgagtctagctgcgtctggaggatatgttaatatcattaagattctgcttaatgctggggcagaaattaattcaaggactgggagtaaactaggtatttctcccctgatgttggctgcaatgaatggacatgttcctgcagtaaaattgctgctcgatatgggttcagacattaatgcccaaatagagaccaatcggaacacggctctcaccctggcctgtttccagggccgagcagaagtagtgagtttgcttctggaccgaaaagccaatgttgaacatagggcaaagacgggtcttacccccttgatggaagcagcttctggagggtatgcagaggttggaagagttcttcttgataaaggagcagatgttaatgctccccctgtgccttcctcaagagatactgctttaacaatagcagcagacaaaggtcactacaaattttgtgaactcctgattcataggggagcccacattgatgttcgtaacaaaaagggaaatacgccactttggctggcatccaatggaggtcattttgatgttgtgcagttgctagtgcaagcaggtgctgatgtggatgcagcagataaccggaaaatcacacctcttatgtcagcatttcgcaagggtcatgtaaaagttgttcaatatttggtaaaggaagtaaatcagttcccttctgatatagaatgcatgagatacatagcaacaattacagataaggaactgttgaaaaaatgtcatcaatgtgtcgaaaccattgtgaaggctaaagaccagcaagctgcagaagcaaataagaatgcgagtattcttttaaaggaacttgatctggaaaagtcaagagaagagagcagaaagcaggctcttgctgctaaaagagaaaaaagaaaagaaaagagaaaaaagaaaaaagaggaacagaaaaggaaacaggaagaagatgaagaaaacaaacctaaggagaattcggaactaccagaggatgaagatgaagaggagaatgatgaagatgtggagcaagaagttcccatagaacctcctagtgcaaccaccaccactacgattggaatctctgcaacatctgcaacattcacaaatgtgtttgggaaaaaaagggccaatgtggtgacaactcccagcaccaatcggaaaaataagaagaacaaaacaaaagaaacccctcctacagcacatttaattttaccagaacaacatatgtctttagcccaacaaaaggcagataaaaataaaataaatggagaacctagaggtggtggtgcaggtgggaatagtgattcagataacttggacagcacagactgcaacagtgagagtagcagtggtggtaaaagccaagagttaaattttgtgatggatgtgaattcctctaaatacccctcactgctccttcattcccaagaagaaaagacaagtactgctacttccaaaactcagacacgacttgaaggtgaagtgactcctaattccttgtcaaccagctacaagacagtgtcattgccattaagctctccaaacataaagctgaatctcactagccctaaaaggggtcagaaaagagaagaagggtggaaagaagttgtacgaaggtcaaagaaattgtctgttccagcctcagtggtgtcgaggataatgggaagaggaggatgcaacatcactgcaatacaggatgttactggtgcccatattgatgtggataaacaaaaagataagaatggcgagagaatgatcacaataaggggtggcacagaatcaacaagatatgcagttcaactaatcaatgcactcattcaagatcctgctaaggaactggaagacttgattcctaaaaatcatatcagaacacctgccagcaccaaatcaattcatgctaacttctcatctggagtaggtaccacagcagcttccagtaaaaatgcatttcctttgggtgctccaactcttgtaacttcacaggcaacaacgttatctacgttccagcccgctaataaacttaataagaatgttccaacaaatgtacgttcttctttcccagtttctctacccttagcttatcctcaccctcattttgccctgctggctgctcaaactatgcaacagattcggcatcctcgcttacccatggcccagtttggaggaaccttctcaccttctcctaacacatggggaccattcccagtgagacctgtgaatcctggcaacacaaatagctctccaaagcataataacacaagccgtctacctaaccagaacgggactgttttaccctcagagtctgctggactagctactgccagttgtcctatcactgtctcttctgtagttgctgccagtcagcaactgtgtgtcactaatacccggactccttcatcagtcagaaagcagttgtttgcctgtgtgcctaagacaagtcctccagcaacagtgatttcttctgtgacaagcacttgtagttccctgccttctgtctcctctgcacctatcactagcgggcaagctcccaccacatttctacctgcaagtacttctcaagcacagctttcttcacaaaagatggagtctttctctgctgtgccacccaccaaagagaaagtgtccacacaggaccagcccatggcaaacctatgtaccccatcttcaactgcaaacagttgcagtagctctgccagcaacaccccgggagctccagaaactcacccatccagtagtcccactcctacttccagtaacacacaagaggaggcacagccatccagtgtgtctgatttaagtcctatgtcaatgccttttgcatctaactcagaacctgctccattgactttgacatcacccagaatggttgctgctgataatcaggacaccagtaatttacctcagttagctgtaccagcacctcgagtttctcatcgaatgcagcccagaggttctttttactccatggtaccaaatgcaactattcaccaggatccccagtctatttttgttacgaatccagttactttaacaccacctcaaggcccaccagctgcagtgcagctttcttcagctgtgaacattatgaatggttctcagatgcacataaacccagcaaataagtctttgccacctacatttggcccagccacacttttcaatcacttcagcagtctttttgatagtagtcaggtgccagctaaccagggctggggagatggtccactgtcctcacgagttgctacagatgcctctttcactgttcagtcagcgttcctgggtaactcagtgcttggacacttggaaaacatgcaccctgataactcaaaggcacctggcttcagaccaccttcccagcgagtttctactagtccagttgggttaccatccattgacccatcaggcagctccccatcttcctcttctgctcctctggcaagtttttccggcataccaggaacaagggttttcctgcaagggccagctcctgttgggactcctagtttcaacagacaacatttttctccccatccttggacaagcgcctcaaactcatccacttctgccccaccaacgttgggccaaccaaaaggagtcagtgccagtcaagatcgaaagatacctcccccaattggaacagagagactggcccgaattcggcaaggagggtctgttgcacaagccccggcggggaccagttttgtcgctcccgttggacacagtggaatctggtcatttggtgtcaatgctgtgtcagaaggcttatcaggttggtcgcaatctgtgatggggaaccatccaatgcatcaacaattatcagacccaagcacattctcccaacatcagccaatggagagagatgattctggaatggtagccccctctaacatttttcatcagcctatggcaagtggttttgtggatttttctaaaggtctgccaatttccatgtatggaggcaccataataccctctcatcctcagcttgctgatgttccaggaggccctctgtttaatggacttcacaatccagatcctgcttggaaccctatgataaaagttatccaaaattcaactgaatgcactgatgcccagcaggccagtctgcttccttcagtccctgctctcaaaggggaaatcccatcacctcagctaaccagaccgaagaagagaattggacggccgatggtggcctctcctaaccagaggcaccaggatcatctacgaccgaaagttcctgctggagtgcaagaactcacccattgcccggacacccccctgctgcctccctcagattcccggggtcacaactcctccaacagcccctctctccaagctggaggagctgaaggagcaggagacagaggaagagatacccgatga

SEQ ID NO: 581 - DNA, 2076 bp, Homo Sapiens
atgggacaggccctgggtatcaagagctgtgactttcaggcagcaagaaacaatgaggagcaccacaccaaggccctcagctcccggcgcctctttgtgaggagggggcagcccttcaccatcatcctgtacttccgcgctccagtccgtgcatttctgcctgccctgaagaaggtggccctcactgcacaaactggagagcagccttccaagatcaacaggacccaagccacattcccaatttccagtctgggggaccgaaagtggtggagtgcagtggtggaggagagagatgcccagtcctggaccatctctgtgaccacacctgcggacgctgtcattggccactactcgcttctgctgcaggtctcaggcaggaagcaactcctcttgggtcagttcacactgctttttaacccctggaatagagaggatgctgtgttcctgaagaatgaggctcagcgcatggagtacttgttgaaccagaatggtctcatctacctgggtacagctgactgcatccaggcagagtcctgggactttggccagttcgagggggatgtcattgacctcagcctgcgcttgctgagcaaggacaagcaggtagagaagtggagccagccggtgcacgtggcccgtgtgttgggtgccttgctgcattttctcaaggagcagagggtcctgcccaccccgcagacccaggccacccaggaaggggccttgctgaacaagcgccggggcagcgtgcccatcctgcggcagtggctcaccggccgaggccgacctgtgtatgatggccaggcctgggtgttggctgctgttgcttgcacagtgctgcgatgcctgggaatccctgcccgcgtggtgaccacgtttgcctcagcacagggcaccggtgggcgtcttctcatagatgaatactataatgaggagggacttcagaacggagaaggccagagaggcagaatctggatcttccagacttccacagagtgctggatgacgcggcctgccttgccccagggttatgatggatggcagattctgcacccaagtgctcctaatggaggtggagtcctggggtcctgtgatctggtgccggtcagagcagtcaaggaggggacgctggggctgaccccagcagtgtcagacctttttgctgccataaatgcctcatgtgtggtctggaagtgctgtgaggatgggacactggagttgactgactccaacacaaagtatgttggcaacaacatcagcaccaagggtgtgggcagtgaccgctgcgaggacatcactcagaactacaagtatcctgaagggtctcttcaggaaaaagaggtgctggagagagtcgagaaagagaaaatggaacgtgagaaagacaacggcatccgtcctcccagtctcgagactgccagtcctctgtacctgctcttgaaagcacccagctccctacccctgagaggggatgcccagatctcagtgacgctggttaatcacagtgagcaggagaaggcagtgcagctggcaattggggtccaggctgtacactacaacggtgtccttgctgccaagctctggaggaagaagctgcacctcacgctcagtgccaacctggaaaagataataaccatcggcctgttcttctccaattttgagcgaaacccacccgagaacaccttccttagactcaccgccatggcaacacactctgaatccaaccttagctgctttgctcaggaagacattgccatttgtagaccacaccttgccatcaagatgccagagaaagcagagcagtatcaacccctcacagcctcagtcagcctccagaactccctagatgcccccatggaggactgtgtgatctccatcctgggaagggggctcattcacagagagaggagctacagattccgttcagtgtggcctgaaaacaccatgtgtgccaagttccagttcacgccaacacatgtggggctccagagactcactgtggaagtggactgcaacatgttccagaacctaaccaactataaaagcgtcaccgtggtagcccctgaactatcagcttaa

SEQ ID NO: 582 - DNA, 1770 bp, Homo Sapiens
atggagctcgagaacatcgtagcgaacacggtgctactcaaggcccgggaaggtggcggtggaaatcgcaaaggcaaaagcaagaaatggcggcagatgctccagttccctcacatcagccagtgcgaagagctgcggctcagcctcgagcgtgactatcacagcctgtgcgagcggcagcccattgggcgcctgctgttccgagagttctgtgccacgaggccggagctgagccgctgcgtcgccttcctggatggggtggccgagtatgaagtgaccccggatgacaagcggaaggcatgtgggcggcagctaacgcagaattttctgagccacacgggtcctgacctcatccctgaggtcccccggcagctggtgacgaactgcacccagcggctggagcagggtccctgcaaagaccttttccaggaactcacccggctgacccacgagtacctgagcgtggccccttttgccgactacctcgacagcatctacttcaaccgtttcctgcagtggaagtggctggaaaggcagccagtgaccaaaaacaccttcaggcaataccgagtcctgggcaaaggtggctttggggaggtgtgcgcctgccaggtgcgggccacaggtaagatgtatgcctgcaagaagctagagaaaaagcggatcaagaagcggaaaggggaggccatggcgctgaacgagaagcagatcctggagaaagtgaacagtaggtttgtagtgagcttggcctacgcctatgagaccaaggacgcgctgtgcctggtgctgacactgatgaacgggggcgacctcaagttccacatctaccacatgggccaggctggcttccccgaagcgcgggccgtcttctacgccgccgagatctgctgtggcctggaggacctgcaccgggagcgcatcgtgtacagggacctgaagcccgagaacatcttgctggatgaccacggccacatccgcatctctgacctgggactagctgtgcatgtgcccgagggccagaccatcaaagggcgtgtgggcaccgtgggttacatggctccggaggtggtgaagaatgaacggtacacgttcagccctgactggtgggcgctcggctgcctcctgtacgagatgatcgcaggccagtcgcccttccagcagaggaagaagaagatcaagcgggaggaggtggagcggctggtgaaggaggtccccgaggagtattccgagcgcttttccccgcaggcccgctcactttgctcacagctcctctgcaaggaccctgccgaacgcctggggtgtcgtgggggcagtgcccgcgaggtgaaggagcaccccctctttaagaagctgaacttcaagcggctgggagctggcatgctggagccgccgttcaagcctgacccccaggccatttactgcaaggatgttctggacattgaacagttctctacggtcaagggcgtggagctggagcctaccgaccaggacttctaccagaagtttgccacaggcagtgtgcccatcccctggcagaacgagatggtggagaccgagtgcttccaagagctgaatgtctttgggctggatggctcagttcccccagacctggactggaagggccagccacctgcacctcctaaaaagggactgctgcagagactcttcagtcgccaaaggattgctgtggaaactgcagcgacagcgaggaagagctccccacccgcctctagcccccagcccgaggcccccaccagcagttggcggtag

SEQ ID NO: 583 - DNA, 681 bp, Homo Sapiens
atggcccggctgctgcaggcgtcctgcctgctttccctgctcctggccggcttcgtctcgcagagccggggacaagagaagtcgaagatggactgccatggtggcataagtggcaccatttacgagtacggagccctcaccattgatggggaggagtacatccccttcaagcagtatgctggcaaatacgtcctctttgtcaacgtggccagctactgaggcctgacgggccagtacattgaactgaatgcactacaggaagagcttgcaccattcggtctggtcattctgggctttccctgcaaccaatttggaaaacaggaaccaggagagaactcagagatccttcctaccctcaagtatgtccgaccaggtggaggctttgtccctaatttccagctctttgagaaaggggatgtcaatggagagaaagagcagaaattctacactttcctaaagaactcctgtcctcccacctcggagctcctgggtacatctgaccgcctcttctgggaacccatgaaggttcacgacatccgctggaactttgagaagttcctggtggggccagatggtatacccatcatgcgctggcaccaccggaccacggtcagcaacgtcaagatggacatcctgtcctacatgaggcggcaggcagccctgggggtcaagaggaagtaa

SEQ ID NO: 584 - DNA, 1392 bp, Homo Sapiens
atggcggcgctgagggctttgtgcggcttccggggcgtcgcggcccaggtgctgcggcctggggctggagtccgattgccgattcagcccagcagaggtgttcggcagtggcagccagatgtggaatgggcacagcagtttgggggagctgttatgtacccaagcaaagaaacagcccactggaagcctccaccttggaatgatgtggaccctccaaaggacacaattgtgaagaacattaccctgaactttgggccccaacacccagcagcgcatggtgtcctgcgactagtgatggaattgagtggggagatggtgcggaagtgtgatcctcacatcgggctcctgcaccgaggcactgagaagctcattgaatacaagacctatcttcaggcccttccatactttgaccggctagactatgtgtccatgatgtgtaacgaacaggcctattctctagctgtggagaagttgctaaacatccggcctcctcctcgggcacagtggatccgagtgctgtttggagaaatcacacgtttgttgaaccacatcatggctgtgaccacacatgccctggaccttggggccatgacccctttcttctggctgtttgaagaaagggagaagatgtttgagttctacgagcgagtgtctggagcccgaatgcatgctgcttatatccggccaggaggagtgcaccaggacctaccccttgggcttatggatgacatttatcagttttctaagaacttctctcttcggcttgatgagttggaggagttgctgaccaacaataggatctggcgaaatcggacaattgacattggggttgtaacagcagaagaagcacttaactatggttttagtggagtgatgcttcggggctcaggcatccagtgggacctgcggaagacccagccctatgatgtttacgaccaggttgagtttgatgttcctgttggttctcgaggggactgctatgataggtacctgtgccgggtggaggagatgcgccagtccctgagaattatcgcacagtgtctaaacaagatgcctcctggggagatcaaggttgatgatgccaaagtgtctccacctaagcgagcagagatgaagacttccatggagtcactgattcatcactttaagttgtatactgagggctaccaagttcctccaggagccacatatactgccattgaggctcccaagggagagtttggggtgtacctggtgtctgatggcagcagccgcccttatcgatgcaagatcaaggctcctggttttgcccatctggctggtttggacaagatgtctaagggacacatgttggcagatgtcgttgccatcataggtacccaagatattgtatttggagaagtagatcggtga

SEQ ID NO: 585 - DNA, 720 bp, Homo Sapiens
atggcggctaccttactagctgctcggggagccgggccagcaccggcttgggggccggaggcgttcactccagactgggaaagccgagaagtttccactgggaccactatcatggccgtgcagtttgacgggggcgtggttctgggggcggactccagaacaaccactgggtcctacatcgccaatcgagtgactgacaagctgacacctattcacgaccgcattttctgctgtcgctcaggctcagctgctgatacccaggcagtagctgatgctgtcacctaccagctcggtttccacagcattgaactgaatgagcctccactggtccacacagcagccagcctctttaaggagatgtgttaccgataccgggaagacctgatggcgggaatcatcatcgcaggctgggaccctcaagaaggagggcaggtgtactcagtgcctatggggggtatgatggtaaggcagtcctttgccattggaggctccgggagctcctacatctatggctatgttgatgctacctaccgggaaggcatgaccaaggaagagtgtctgcaattcactgccaatgctctcgctttggccatggagcgggatggctccagtggaggagtgatccgcctggcagccattgcagagtcaggggtagagcggcaagtacttttgggagaccagatacccaaattcgccgttgccactttaccacccgcctga

SEQ ID NO: 586 - DNA, 468 bp, Homo Sapiens
atggcgtcgctcaaatgtagcaccgtcgtctgcgtgatctgcttggagaagcccaaataccgctgtccagcctgccgcgtgccctactgctcggtagtctgcttccggaagcacaaagaacagtgcaaccctgaaactcgtcctgttgagaaaaaaataagatcagctcttcctaccaaaaccgtaaagcctgtggaaaacaaagatgatgatgactctatagctgattttctcaatagtgatgaggaagaagacagagtttctttgcagaatttaaagaatttaggggaatctgcaacattaagaagcttattgctcaatccacacctcaggcagttgatggtcaacctcgatcagggagaagacaaagcaaagctcatgagagcttacatgcaagagcctttgtttgtggagtttgcagactgctgtttaggaattgtggagccatcccagaatgaggagtcttaa

SEQ ID NO: 587 - DNA, 870 bp, Homo Sapiens
atggtgggggtgaagcccgtcgggagcgacccggatttccagccagagctgagcggcgcgggctccagactcgccgtggtcaagttcaccatgagagggtgtgggccatgtttgaggattgccccagcattcagttctatgagtaataaatatccacaggctgttttcttggaagtcgatgtacatcagtgtcagggaacagctgccaccaacaatatatcagcaacacctacatttttgttttttcgaaacaaagtgagaattgatcaatatcaaggagcagatgctgtgggattagaagaaaaaatcaagcagcacttagaaaatgaccctggaagcaatgaggacacagatattccaaaaggctatatggatttaatgccttttattaacaaagctggttgtgaatgtcttaatgaaagtgatgagcatggatttgacaactgtttacgaaaagacacaaccttcttggaatctgactgtgatgaacagctgcttattactgtggcattcaatcaacctgttaagctttattccatgaaatttcaagggccagataatggtcagggccctaaatatgtaaaaatttttatcaacctaccccgatctatggattttgaagaggcagaaagaagtgaaccaactcaagctctggaactgacagaggatgatattaaagaagatggcattgttccacttcgttatgttaagtttcagaatgttaacagtgtaactatatttgttcagtcgaatcaaggtgaagaggaaacaacaagaatttcatattttacttttattggtactccagtccaggcaacaaatatgaatgacttcaaacgagtagttggcaaaaaaggagaaagccactaa

SEQ ID NO: 588 - DNA, 441 bp, Homo Sapiens
atgcttgcgggtgccgggaggcctggcctcccccagggccgccacctctgctggttgctctgtgctttcaccttaaagctctgccaagcagaggctcccgtgcaggaagagaagctgtcagcaagcacctcaaatttgccatgctggctggtggaagagtttgtggtagcagaagagtgctctccatgctctaatttccgggctaaaactacccctgagtgtggtcccacaggatatgtagagaaaatcacatgcagctcatctaagagaaatgagttcaaaagctgccgctcagctttgatggaacaacgcttattttggaagttcgaaggggctgtcgtgtgtgtggccctgatcttcgcttgtcttgtcatcattcgtcagcgacaattggacagaaaggctctggaaaaggtccggaagcaaatcgagtccatatag

SEQ ID NO: 589 - DNA, 708 bp, Homo Sapiens
atgagatgggctgccccaggaaagaagacatctggtctgcaacagaaaaatattgaagtgaaaacaaaaaagaacaaacagaaaacacctggaaatggagatggtggcagtaccagtgagactccccagcctcctcgaaagaaaagggcccaggtagatcctactgttgaaaatgaggaaacattcatgaacagagttgaagttaaagtaaagattcctgaagagctaaaaccatggcttgttgatgactgggacttaattaccaggcaaaaacagctcttctatcttcctgccgagaagaatgtggattccattcttgaggactatgcaaattacaagaaatctcatggaaacacagataataaggagtatgcagttaatgaagttgtggcagggataaaagaatacttcaacctaatgttgggcacccagctactcaacaaatttgagagaccacagtatgccgaaattcttgcagattgtcccgatgcacccatgtcccaggtgtatggagtgccacatctcctgagattatctgtacaaattggagcaatgttggcctatacacctctgaatgagaagagccttgctttattactcaattatcttcacgatttcctaaagtacctggcaaagaattctgcaactttgtttagtgccagcgattatgaagtggctcttcctgagtaccatcggaaagctgtgtga

SEQ ID NO: 590 - DNA, 1224 bp, Homo Sapiens
atgacgacctcaggcgcgctctttccaagcctggtgccaggctctcggggcgcctccaacaagtacttggtggagtttcgggcgggaaagatgtccctgaaggggaccaccgtgactccggataagcggaaagggctggtgtacattcagcagacggacgactcgcttattcacttctgctggaaggacaggacgtccgggaacgtggaagacgacttgatcatcttccctgacgactgtgagttcaagcgggtgccgcagtgccccagcgggagggtctacgtgctgaagttcaaggcagggtccaagcggcttttcttctggatgcaggaacccaagacagaccaggatgaggagcattgccggaaagtcaacgagtatctgaacaaccccccgatgcctggggcgctgggggccagcggaagcagcggccacgaactctctgcgctaggcggtgagggtggcctgcagagcctgctgggaaacatgagccacagccagctcatgcagctcatcggaccagccggcctcggaggactgggtgggctgggggccctgactggacctggcctggccagcttactggggagcagtgggcctccagggagcagctcctcctccagctcccggagccagtcggcagcggtcaccccgtcatccaccacctcttccacccgtgccaccccagccccttctgctccagcagctgcctcagcaactagcccgagccccgcgcccagttccgggaatggagccagcacagcagccagcccgacccagcccatccagctgagcgacctccagagcatcctggccacgatgaacgtaccagccgggccagcaggcggccagcaagtggacctggccagtgtgctgacgccggagataatggctcccatcctcgccaacgcggatgtccaggagcgcctgcttccctacttgccatctggggagtcgctgccgcagaccgcggatgagatccagaataccctgacctcgccccagttccagcaggccctgggcatgttcagcgcagccttggcctcggggcagctgggccccctcatgtgccagttcggtctgcctgcagaggctgtggaggccgccaacaagggcgatgtggaagcgtttgccaaagccatgcagaacaacgccaagcccgagcagaaagagggcgacacgaaggacaagaaggacgaagaggaggacatgagcctggactga

SEQ ID NO: 591 - DNA, 16293 bp, Homo Sapiens
atgtcttcctcagatgaagagacgctcagtgagcggtcatgtcggagtgagcggtcttgtcggagtgagcgatcttacaggagcgagcggtcggggagcctgtctccctgtcccccaggggacaccttgccctggaacctgccactgcatgagcagaaaaagcggaaaagccaggattcggtgctggaccctgcagagcgtgctgtggtcagagtcgctgatgaacgggaccgggttcagaagaaaacgttcaccaagtgggtcaacaagcacttaatgaaggtccgcaagcacatcaatgatctttatgaagatctgcgggatggccataacctgatctctctgttggaggtcctctcaggcatcaaactgccccgggagaagggcaggatgcgttttcataggctgcagaatgtgcagattgccctggacttcctaaagcagcgacaggtgaaactagtgaatattcgcaatgatgacatcacagatggcaaccccaagttgaccctgggtctgatctggaccattattttgcatttccagatctctgacatctacattagtggagaatcaggggatatgtcagccaaggagaaactactcctgtggacccagaaggtgacagctggttacacaggaatcaaatgcaccaacttttcctcctgctggagtgatgggaagatgttcaatgcactcattcaccgataccgacccgatctagtagacatggagagggtgcaaatccaaagtaaccgagagaatctggaacaggcttttgaagtggcagaaagactgggggtcactcgcctgctggatgcagaagatgtggatgtgccatctccagatgaaaagtctgtaatcacttatgtgtcttcgatttatgatgccttccctaaagttcctgagggtggagaagggatcagtgctacggaagtggactccaggtggcaagaataccaaagccgagtggactccctcattccctggatcaaacagcatacaatactgatgtcagataaaacttttccccaaaaccctgttgaactaaaggcactttataaccaatatatacacttcaaagaaacagaaattctggccaaggagagagaaaaaggaagaattgaggaattatataaattactagaggtgtggattgaatttggccgaattaaactgcctcaaggttatcaccctaatgatgtggaagaagagtggggaaagctcatcatagagatgctggaacgagagaaatcacttcggccggctgtggagaggctggaattgctgctacagattgcaaacaaaatccagaatggtgctttgaactgtgaagaaaaactgacactagctaagaatacactgcaggctgatgctgctcacctggaatcaggacaaccggtacaatgtgagtcagatgtcattatgtacattcaggagtgtgaaggtctcatcaggcagctgcaggtggatctccagatcctgcgggatgagaattactaccagctagaagagctggcttttagggtcatgcgtcttcaggatgagctggtcaccttgcgtctagagtgtacaaacctgtaccggaagggtcatttcacttcacttgaattggttccaccctctactttaaccaccactcatctgaaagcagaacccttaaccaaggcaacccattcttcttctacctcctggttccgaaagcctatgactcgggctgaacttgtggccatcagctcctctgaagatgaaggcaatctccgatttgtgtatgaactactgtcttgggtagaagagatgcagatgaaactggagcgagcagagtggggcaatgacctgcctagtgtggagttgcagctagaaacacagcagcacatccatacgagtgtagaagagctgggctcaagtgtcaaggaggccaggttgtatgagggaaagatgtcccagaatttccataccagctatgctgaaactcttggaaagctggagacacagtattgtaaattgaaggaaacttctagcttccggatgaggcaccttcagagcctgcataaatttgtttccagagctacagctgagttgatctggttgaatgagaaggaggaggaggaactagcatatgactggagtgacaacaattccaatatctcagccaagagaaattacttctctgagttgacaatggaactggaggagaaacaggatgtgtttcgttctctacaagatacagcagaactactttcacttgagaaccacccagccaagcagacagtggaggcttacagtgctgctgtccagtcccagttgcagtggatgaagcagctgtgcctgtgtgttgagcagcatgtgaaagagaatactgcttattttcagttcttcagtgatgcacgagagctggagtcattcttgaggaacctccaagattccattaaacgaaaatattcctgtgaccacaacaccagcttatcccgccttgaagacctgctccaggactccatggatgaaaaggagcagcttatacagtccaagagttccgttgccagtctcgttgggagatcaaaaaccatcgttcagctaaaaccacgcagtccagaccatgtgttaaagaacaccatttctgtcaaggctgtctgtgactacaggcagatcgagattactatttgcaaaaatgatgaatgtgtgctagaagataattctcagcggaccaaatggaaagtgatcagccccacagggaacgaggcaatggtgccgtcagtctgcttcctcatccccccacccaataaggatgccattgagatggccagcagggtcgaacaatcttatcagaaggttatggccctttggcatcagctgcatgttaacaccaaaagccttatctcttggaactatctgcgtaaagaccttgaccttgtacagacctggaacctagaaaagcttcgatcctcagcaccaggggagtgccatcagattatgaagaaccttcaggcccactatgaagactttctgcaggatagtcgtgactctgtgctgttctcagtggctgatcgcttgcgcttggaagaggaggtggaagcttgtaaagcccgcttccagcacctgatgaagtccatggagaatgaggacaaagaggagactgtggccaagatgtacatttcagagttgaagaacatccggctacgcctggaggagtatgaacagagggtggtcaaacgaattcagtctctagccagctctaggactgacagagatgcctggcaggacaatgcattaaggattgcagagcaagagcacacccaggaggatttacagcaattgaggtcagacttggatgcagtttctatgaaatgtgacagctttctccatcagtctccatctagttcaagtgtcccaactctgcgctcagaactgaatctgctggtggagaagatggaccatgtctatggtctctctactgtatatctgaataagttaaagacagttgatgttatagtacgtagcatacaggatgctgaactcttggtcaaaggttatgagattaagctgagtcaagaagaagtagtactggcagatctctcagctctggaggcccattggtcgacattacggcactggcttagtgatgtgaaggacaagaattcagtgttttcagtcctggatgaggaaattgccaaggccaaggtagtggcagagcagatgagtcgtctgacaccagagcgaaatctggatttggagcgctatcaggaaaaaggctcccagctgcaggagcgttggcaccgagtcattgcccagctcgagattcgccaatctgagctagaaagtatccaggaagttctgggagattaccgagcctgccatggaactctcatcaagtggattgaggaaaccactgcccagcaggaaatgatgaagccaggccaggcagaggatagcagagtgctttcggagcagctcagccagcagacggccctatttgcagaaattgagagaaatcagacaaaactggatcaatgtcaaaaattttcccagcagtactctactattgtaaaggactatgaattgcaactgatgacatacaaggcctttgtggaatcgcagcagaaatcccctggcaagcgccgtcgcatgctttcctcttcagatgccatcactcaagagttcatggacttaaggactcgctacacggcattggtgactttaacaactcagcacgtgaaatacatcagtgatgcactccggcgtctggaggaggaggagaaagtggtagaagaggagaaacaagaacatgtggagaaggttaaagaacttttgggctgggtgtctaccctagcgaggaatacacaaggaaaagctacctcatccgagaccaaagaatcaacagacattgaaaaagctattttggaacagcaggttctgtcagaagagctgacaacaaagaaagaacaagtctctgaagctattaaaacatcacagatcttcttggccaagcatggtcataagctctcagaaaaagagaagaaacaaatatctgagcaattgaatgccctaaacaaggcttaccatgacctttgtgatggttctgcaaatcagcttcagcagcttcagagccagttggctcaccagacagaacaaaagaccctgcagaaacaacaaaatacctgtcaccagcaactggaggatctttgcagttgggtaggacaggcagaaagagcactggcaggccaccaaggcagaaccacccagcaggatctctctgctttgcagaagaaccaaagtgacttgaaggatttacaggatgacattcagaatcgtgccacctcatttgccactgttgtcaaggacattgaggggttcatggaagagaatcagaccaagctgagcccacgtgagttgacagctcttcgggaaaagcttcatcaggctaaggagcaatatgaggcgctccaggaagagacacgtgtggcccagaaggaactggaggaagcagtgacctccgccttacagcaggagactgaaaagagtaaagcagcaaaggaactggcagagaacaagaagaagatcgatgctctcctggattgggtaacttcagtaggatcatctggtggacagctgctgaccaaccttccaggaatggagcagctctcgggagctagcttggagaaaggagccttggacaccactgatggttacatgggggtgaatcaagccccagagaaactggacaagcaatgtgagatgatgaaggcccgtcaccaagaattgctgtcccagcagcaaaatttcattctggccacccagtcagctcaggccttcttggatcagcatggccacaatctcacacctgaggagcaacagatgctgcaacagaagctgggagagctaaaggaacaatactctacttccctggcccaatcagaggcagaactgaagcaggtgcagacacttcaggatgagttgcagaaatttctgcaggatcataaagagtttgaaagctggttggaacgatccgagaaagagctggagaacatgcataagggaggcagcagccccgagacccttccctccctgctaaagcggcaaggaagcttctcagaggatgtcatttcccacaaaggagacttgagatttgtgactatctcaggacagaaagtcttggacatggaaaacagttttaaggaaggcaaagaaccatcagaaattggaaacttagtaaaggacaagttgaaggatgcaacagaaagatacactgctctccactcaaagtgtacacgattaggatctcacctgaatatgctgttaggccagtatcatcaattccaaaacagtgctgacagcctgcaggcctggatgcaggcttgtgaggccaacgtggagaagctcctctcagatactgttgcctctgaccctggagttctccaggagcagcttgcaacaacaaagcagttgcaggaggaattggctgagcaccaagtacctgtggaaaaactccaaaaagtagctcgtgacataatggaaattgaaggggagccagccccagaccacaggcatgttcaagaaactacagattccatactcagccacttccaaagcctctcctatagcctggctgagcgatcttctctgctgcagaaagcaattgcccaatctcagagtgtccaggaaagcctggagagcctgttgcagtctattggggaagttgaacaaaacctggaagggaagcaggtgtcatcactctcatcaggagtcatccaggaagccttagccacaaatatgaaattgaagcaggacattgctcggcaaaagagcagcttggaggccacccgtgagatggtgacccgattcatggagacagcagacagtactacagcagcagtgctgcagggcaaactggcagaggtgagccagcggttcgaacagctctgtctacagcagcaagaaaaggagagctccctaaagaagcttctaccccaggcagagatgtttgaacacctctctggtaagctgcagcagttcatggaaaacaaaagtcggatgctggcctctggaaatcagccagatcaagatattacacatttcttccaacagatccaggagctcaatttggaaatggaagaccaacaggagaacctagatactcttgagcacctggtcactgaactgagctcttgtggctttgcgctggacttgtgccagcatcaggacagggtacagaatctaagaaaagacttcacagagctacagaagacagttaaagagagagagaaagatgcatcatcttgccaggaacagttggatgaattccggaagctggtcaggaccttccagaaatggttgaaagaaactgaagggagtattccacctacggaaacttctatgagtgctaaagagttagaaaagcagattgaacacctgaagagtctactagatgactgggcaagtaagggaactctggtggaagaaatcaattgcaaaggtacttctttagaaaatctcatcatggaaatcacagcacctgattcccaaggcaagacaggttccatactgccctctgtaggaagctctgtaggcagtgtaaacggataccacacctgcaaagatctgacggagatccagtgtgacatgtcagatgtaaacttgaagtatgagaaactagggggagtacttcatgaacgccaggaaagccttcaggctatcctcaacagaatggaggaggttcacaaggaggcaaactctgtgctgcagtggctggaatcaaaagaggaagtcctgaaatccatggatgccatgtcatctccaaccaagacagaaacagtgaaagcccaagctgaatctaacaaggccttcctggctgagttggaacagaattctccaaaaattcaaaaagtaaaggaagccctggctggattactggtgacatatcccaactcacaggaagcagaaaattggaagaaaattcaggaagaactcaattcccgatgggaaagggccactgaggttactgtggctcggcaaaggcagctagaggaatctgcaagtcatctggcctgcttccaggctgcagaatcccagctccggccgtggctgatggagaaagaactgatgatgggagtgctggggcccctgtctattgaccccaacatgttgaatgcacaaaagcaacaggtccagtttatgctaaaggaatttgaagcacgcaggcaacagcatgagcaactgaatgaggcagctcagggcatcctaacaggccctggagatgtctctctgtccaccagccaagtacagaaagaactccagagcatcaatcagaaatgggttgagctgactgacaaactcaactcccgttccagccaaattgaccaagctattgttaagagcacccagtaccaggaactgctccaggacttatcagagaaggtgagggcagttggacaacggctgagtgtccagtcagctatcagcacccaaccagaggctgtaaagcagcaattggaagagaccagtgaaattcgatctgacttggagcagttagaccacgaggttaaggaggctcagacactgtgcgatgaactctcagtgctcattggtgagcagtacctcaaggatgaactgaagaagcgtttggagacagttgccctgcctctccaaggtttagaagaccttgcagccgatcgcattaacagactccaggcagctcttgccagcacccagcagttccagcaaatgtttgatgagttgaggacctggttggatgataaacaaagccagcaagcaaaaaactgcccaatttctgcaaaattggagcggctacagtctcagctacaggagaatgaagagtttcagaaaagtcttaatcaacacagtggctcctatgaggtgattgtggctgaaggggaatctctacttctttctgtacctcctggagaagagaaaaggactctacaaaaccagttggttgagctcaaaaaccattgggaagagcttagtaaaaaaactgcagacagacaatccaggctcaaggattgtatgcagaaagctcagaaatatcagtggcatgtggaagaccttgtgccatggatagaagattgtaaagctaagatgtctgagttgcgagtcactctggatccagtgcagctagagtccagtctcctaagatcaaaggctatgctgaatgaggtggagaagcgccgctccctgctggaaatattgaatagtgctgctgacattctgatcaattcttcagaagcagatgaggatggaatccgggatgagaaggctgggatcaaccagaacatggatgctgttacagaagagctgcaggccaaaacagggtcactcgaagaaatgactcagaggctcagggagttccaggaaagctttaagaatattgaaaagaaggttgaaggagccaaacaccaacttgagatctttgatgctctgggttctcaagcctgtagcaacaagaacctggagaagctaagagctcaacaggaagtgctgcaggccctagagcctcaggtagactatctgaggaactttactcagggtctggtagaagatgccccagatggatctgatgcttctcaacttctccaccaagctgaggtcgcccagcaagagttcctcgaagttaagcaaagagtgaacagtggttgtgtgatgatggaaaacaagctggaggggattggccagtttcactgccgggtccgagagatgttctctcaattggcagacctggatgatgagctagatggcatgggtgctattggcagagacactgatagcctccagtcccaaatcgaggatgtccggctattccttaacaaaattcacgtcctcaaattagacatagaggcctctgaagcagagtgtcgacatatgctagaagaagaggggactctggatttgttaggtctcaaaagggagctagaagccctgaacaaacagtgtggcaaactgacagagagggggaaagctcgtcaggaacagctggaactgacactaggccgtgtagaggacttctacaggaaattgaaaggactcaatgacgcgaccacagcagcagaggaggcagaggccctccagtgggtagtggggaccgaagtggaaatcatcaaccaacaattagcagattttaaaatgtttcagaaagaacaagtggatcctcttcagatgaaattgcagcaggtgaatggacttggccagggattaattcagagtgcaggaaaagactgtgatgtacagggtttagaacatgacatggaagagatcaatgctcgatggaatacattgaataaaaaggtcgcacaaagaattgcacagctacaggaagctttgttgcattgtgggaagtttcaagatgccttggagccattgctcagctggttggcagataccgaggagctcatagccaatcagaaacctccatctgctgagtataaagtggtgaaagcacagatccaagaacagaagttgctccagcggctcctagatgatcgaaaggccacagtagacatgcttcaagcagaaggaggcagaatagcccagtcagcagagctggctgatagagagaaaatcactggacagctggagagtcttgaaagtagatggactgaactactcagtaaggcagcagccaggcaaaaacagctggaagacatcctggttctggccaaacagttccatgagacagctgagcctatttctgacttcttatctgtcacagagaaaaagcttgctaactcagaacctgttggcactcagactgccaaaatacagcagcagatcattcggcacaaggctctggaagaagacatagaaaaccatgcaacagatgtgcaccaggcagtcaaaattgggcagtccctctcctccctgacatctcctgcagaacagggtgtgctgtcagaaaagatagactcattgcaggcccgatacagtgaaattcaagaccgctgttgtcggaaggcagccctacttgaccaagctctgtctaatgctaggctgtttggggaggatgaggtggaggtgctcaactggctggctgaggttgaggacaagctcagttcagtgttcgtaaaggatttcaaacaggatgtcctgcacaggcagcatgctgaccacctggctttaaatgaagaaattgttaatagaaagaagaatgtagatcaagctattaaaaatggtcaggctcttctaaaacaaaccacaggtgaggaggtgttacttatccaggaaaaactagatggtataaagactcgttacgcagacatcacagttactagctccaaggccctcagaactttagagcaagcccggcagctggccaccaagttccagtctacttatgaggaactgaccgggtggctgagggaggtggaggaggagctggcaaccagtggaggacagtctcccacaggggaacagataccccagtttcagcagagacagaaggaattaaagaaggaggtcatggagcacaggctggtgttggacacagtgaatgaggtgagccgtgctctcttagagctggtgccctggagagccagagaagggctggataaacttgtgtccgatgctaacgagcagtacaaactagtcagtgacactattggacaaagggtggatgaaattgatgctgctattcagagatcacaacagtatgagcaagctgccgatgcagaactagcttgggttgctgaaacaaaacggaaactgatggctctgggtccaattcgcctggaacaggaccagaccacagctcagcttcaggtacagaaggctttctccattgacattattcgacacaaagattcaatggatgaactcttcagtcaccgtagtgaaatctttggcacatgtggggaggagcaaaaaactgtattacaggaaaagacagagtctctaatacagcaatatgaagccattagcctactcaattcagagcgttatgcccgcctagagcgggcccaggtcttagtaaaccagttttgggaaacttatgaagagctcagcccctggattgaggaaactcgggcactaatagcacagttaccctctccagccattgatcatgagcagctcaggcagcaacaagaggaaatgaggcaattaagggaatctattgctgaacacaaacctcatattgacaaactactaaagataggcccacaactaaaggaattaaaccctgaggaaggggaaatggtggaagaaaaataccagaaagcagaaaacatgtatgcccaaataaaggaggaggtgcgccagcgagccctggctctggatgaagccgtgtcccagtccacacagattacagagtttcatgataaaattgagcctatgttggagacactggagaatctttcctctcgcctgcgtatgccaccactgatccctgctgaagtagacaagatcagagagtgcatcagtgacaataagagtgccaccgtggagctagaaaaactgcagccatcctttgaggccttgaagcgccgtggagaggagcttattggacgatctcagggagcagacaaggatctggctgcaaaagaaatccaggataaattggatcaaatggtattcttctgggaggacatcaaagctcgggctgaagaacgagaaatcaaatttcttgatgtccttgaattagcagagaagttctggtatgacatggcagctctcctgaccaccatcaaagacacccaggatattgtccatgacttggaaagcccaggcattgatccttccatcatcaaacaacaggttgaagctgctgagactattaaggaagagacagatggtctgcatgaagagctggagtttattcggatccttggagcagatttgatttttgcctgtggagaaactgagaagcctgaagtgaggaagagcattgatgagatgaataatgcttgggagaacttaaacaaaacatggaaagagaggctagaaaaacttgaggatgctatgcaagctgctgtgcagtatcaggacactcttcaggctatgtttgactggctagataacactgtgattaaactctgcaccatgccccctgttggcactgacctcaatactgttaaagatcagttaaatgaaatgaaggagttcaaagtagaagtttaccaacagcaaattgagatggagaagcttaatcaccagggtgaactgatgttaaagaaagctactgatgagacggacagagacattatacgagaaccactgacagaactcaaacacctctgggagaacctgggtgagaaaattgcccaccgacagcacaaactagaaggggctctgttggcccttggtcagttccagcatgccttagaggaactaatgagttggctgactcataccgaagagttgttagatgctcagagaccaataagtggagacccaaaagtcattgaagttgagctcgcaaagcaccatgtcctaaaaaatgatgttttggctcatcaagccacagtggaaacagtcaacaaagctggcaatgagcttcttgaatccagtgctggagatgatgccagcagcttaaggagccgtttggaagccatgaaccaatgctgggagtcagtgttacagaaaacagaggagagggagcagcagcttcagtcaactctgcagcaggcccagggcttccacagtgaaattgaagatttcctcttggaacttactagaatggagagccagctttctgcatctaagcccacaggaggacttcctgaaactgctagggaacagcttgatacacatatggaactctattcccagctgaaagccaaggaagagacttataatcaactacttgacaagggcagactcatgcttctaagccgtgacgactctgggtctggctccaagacagaacagagtgtagcacttttggagcagaagtggcatgtggtcagcagtaagatggaagaaagaaagtcaaagctggaagaggccctcaacttggcaacagaattccagaattccctacaagaatttatcaactggctcactctagcagagcagagtttaaacatcgcttctccaccaagcctgattctaaatactgtcctttcccagatagaagagcacaaggtttttgctaatgaagtaaatgctcatcgagaccagatcattgagctggatcaaactgggaatcaattaaagttccttagccaaaagcaggatgttgttctgatcaagaatttgttggtgagcgtgcagtctcgatgggagaaggttgtccagcgatctattgaaagagggcgatcactagatgatgccaggaagcgggcaaaacaattccatgaagcttggaaaaaactgattgactggctagaagatgcagagagtcacctggactcagaactagagatatccaatgacccagacaaaattaaacttcagctttctaagcataaggagtttcagaagactcttggtggcaagcagcctgtgtatgataccacaattagaactggcagagcactgaaagaaaagactttgcttcccgaagatagtcagaaacttgacaatttcctaggagaagtcagagacaaatgggatactgtttgtggcaagtctgtggagcggcagcacaagttggaggaagccctgctcttttcgggtcagttcatggatgctttgcaggcattggttgactggttatacaaggtggagccacagctggctgaggaccagcccgtgcacggggaccttgacctcgtcatgaacctcatggatgcacacaaggttttccagaaggaactgggaaagcgaacaggaaccgttcaggtcctgaagcggtcaggccgagagctgattgagaatagtcgagatgacaccacttgggtaaaaggacagctccaggaactgagcactcgctgggacactgtctgtaaactctctgtttccaaacaaagccggcttgagcaggccttaaaacaagcggaagtgtttcgagacacagtccacatgctgttggagtggctttctgaagcagagcaaacgcttcgctttcggggagcacttcctgatgacacagaggccctgcagtctctcattgacacccataaggaattcatgaagaaagtagaagaaaagcgagtggacgttaactcagcagtagccatgggagaagtcatcctggctgtctgccaccccgattgcatcacaaccatcaaacactggatcaccatcatccgagctcgcttcgaggaggtcctgacatgggctaagcagcaccagcagcgtcttgaaacggccttgtcagaactggtggctaatgctgagctcctggaagaacttctggcatggatccagtgggctgagaccaccctcattcagcgggatcaggagccaatcccgcagaacattgaccgagttaaagcccttatcgctgagcatcagacatttatggaggagatgactcgcaaacagcctgacgtggaccgggtcaccaagacatacaaaaggaaaaacatagagcctactcacgcgcctttcatagagaaatcccgcagcggaggcaggaaatccctaagtcagccaacccctcctcccatgccaatcctttcacagtctgaagcaaaaaacccacggatcaaccagctttctgcccgctggcagcaggtgtggctgttagcactggagcggcaaaggaaactgaatgatgccttggatcggctggaggagttgaaagaatttgccaactttgactttgatgtctggaggaaaaagtatatgcgttggatgaatcacaaaaagtctcgagtgatggatttcttccggcgcattgataaggaccaggatgggaagataacacgtcaggagtttatcgatggcattttagcatccaagttccccaccaccaagttagagatgactgctgtggctgacattttcgaccgagatggggatggttacattgattattatgaatttgtggctgctcttcatcccaacaaggatgcgtatcgaccaacaaccgatgcagataaaatcgaagatgaggttacaagacaagtggctcagtgcaaatgtgcaaaaaggtttcaggtggagcagatcggagagaataaataccggtttggggattctcagcagttgcggctggtccgtattctgcgcagcaccgtgatggttcgcgttggtggaggatggatggccttggatgaatttttagtgaaaaatgatccctgccgagcacgaggtagaactaacattgaacttagagagaaattcatcctaccagagggagcatcccagggaatgacccccttccgctcacggggtcgaaggtccaaaccatcttcccgggcagcttcccctactcgttccagctccagtgctagtcagagtaaccacagctgtacatccatgccatcttctccagccaccccagccagtggaaccaaggttatcccatcatcaggtagcaagttgaaacgaccaacaccaacttttcattctagtcggacatcccttgctggtgataccagcaatagttcttccccggcctccacaggtgccaaaactaatcgggcagaccctaaaaagtctgccagtcgccctgggagtcgggctgggagtcgagccgggagtcgagccagcagccggcgaggaagtgacgcttctgactttgacctcttagagacgcagtctgcttgttccgacacttcagaaagcagcgctgcagggggccaaggcaactccaggagagggctaaacaaaccttccaaaatcccaaccatgtctaagaagaccaccactgcctcccccaggactccaggtcccaagcgataa

SEQ ID NO: 592 - DNA, 1128 bp, Homo Sapiens
atgatgtgtcagtcagaggcgcggcaaggaccagagctccgcgcggcgaaatggttgcacttcccccagctggccctgaggcggaggctggggcagctgagctgcatgtccagacccgctctgaaactgcgctcctggcccttgaccgtcctctactacctcctgcccttcggcgccctcagaccgctcagccgggtgggatggaggcccgtaagcagggtggctttgtacaagtcagtgccaacgcgcttgctgtcacgggcctggggtcgcctcaatcaggtggagctgccacactggctgcgcaggcccgtctacagcctgtacatctggacgtttggggtgaacatgaaagaggccgctgtggaggacctgcatcactaccgcaacctcagcgagttcttccggcgcaagctgaagccgcaggcccggcctgtctgtggcctgcacagcgtgattagcccatcggatggaaggatcctcaactttgggcaggtgaagaactgtgaggtggagcaggtaaagggggtcacctactccctggagtcgttcctgggcccgcgtatgtgcacagaggacctgcccttcccaccagccgcgtcgtgtgactccttcaagaaccagctggtcacccgggaagggaatgagctctatcactgtgtcatctacctggcccctggggactaccactgcttccactcccccaccgactggactgtgtcccaccggcgccacttcccaggctccctgatgtcagtgaaccctggcatggctcgctggatcaaagagctcttctgccataacgagcgggtggtcctgacgggggactggaaacatggcttcttctcactgacagctgtgggggccaccaacgtgggctccattcgcatctactttgaccgggacctgcacacaaacagcccaaggcacagcaagggctcctacaatgacttcagcttcgtgacgcacaccaatagagagggcgtccccatgcgtaagggcgagcacctgggcgagttcaacctgggctccaccatcgtgctcatcttcgaggcccccaaggacttcaatttccagctgaaaacaggacagaaaatccgctttggggaagccctgggctcgctctag

SEQ ID NO: 593 - DNA, 1755 bp, Homo Sapiens
atggcgtctgtgcaggcgtcccgccgccagtggtgctacctgtgcgacctgcccaagatgccgtgggccatggtgtgggacttcagcgaggccgtgtgtcgcggctgcgtgaacttcgagggcgcggaccgcatcgaactgctcatcgatgccgcccgccagctcaagcgcagccacgtgctccccgagggccgctcgcccgggcccccggcccttaagcacccggccaccaaggacctggcggcggcagccgcacaggggccccagctgccgcccccgcaggcccagccccagccgtcagggaccggcggcggcgtgtcgggccaggaccgctatgacagggccacatcatcaggccgcctccccctgccctcgcccgccctggagtacactctggggtcccgcctggccaatgggctgggccgtgaggaggccgtggctgagggggcgcgaagggccttgcttggctccatgcctggcttgatgccccctgggctgctggcagctgcagtgtctggcctgggaagccgaggcctgacgctggcacccggcttgagtcctgcccgtcccctcttcggctccgatttcgagaaagagaagcagcagaggaatgcggactgtctggcagaactgaacgaggccatgcgaggccgcgcagaggaatggcacgggcgccccaaagcagtgcgggaacagctactggcgctgtccgcctgcgccccgttcaatgtgcgcttcaagaaggatcacgggctggtggggcgagtgttcgccttcgatgctactgcccgtcctccaggatacgagttcgagctgaagctcttcaccgaatacccctgtggttccggcaatgtgtacgccggcgtcctggcagtggctcgccagatgttccacgatgctctgcgggagccgggcaaggcactggcttcttcgggcttcaagtacctcgaatatgaacgccggcatggatcaggagaatggcggcagctgggcgagctgcttaccgacggcgtccgcagcttccgcgagccagctcccgcggaggccctgccccagcagtacccagagccggcccctgcggctctctgtggcccacccccgcgagccccatcccggaacctggcgcccacgccgcgccgtcgcaaggcatcccccgagccggagggcgaggcggctgggaagatgaccaccgaggagcagcagcaacggcactgggtggcacccggcggcccgtactccgctgagacccctggtgtgccctcgcccattgccgccctgaagaatgtggccgaagccctgggccactcacccaaggaccctggcggaggcggggggcctgtgcgtgcagggggcgccagccctgcagcctcctccacggcccagccgccaacccagcatcgccttgtggcccgcaacggcgaagcagaagtcagtcccacagcgggggccgaagctgtcagcgggggtggcagcggcactggggcgacccctggggcccccctgtgctgtaccctgtgcagggagcggctggaagacacccacttcgtccagtgcccctcggtgcccggacacaagttctgctttccctgctcccgggagttcatcaaggcgcagggcccggccggggaggtgtactgcccgagcggagacaagtgcccgctggtcggctcctccgtgccctgggccttcatgcagggcgagatcgccaccatccttgctggagacatcaaagttaagaaagaacgggacccctag

SEQ ID NO: 594 - DNA, 2382 bp, Homo Sapiens
atgtggatccaggttcggaccatggacgggaggcagacccacacggtggactcgctgtccaggctgaccaaggtggaggagctgaggcggaagatccaggagctgttccacgtggagccaggcctgcagaggctgttctacaggggcaaacagatggaggacggccataccctcttcgactacgaggtccgcctgaatgacaccatccagctcctggtccgccagagcctcgtgctcccccacagcaccaaggagcgggactccgagctctccgacaccgactccggctgctgcctgggccagagtgagtcagacaagtcctccacccacggtgaggcggccgccgagactgacagcaggccagccgatgaggacatgtgggatgagacggaattggggctgtacaaggtcaatgagtacgtcgatgctcgggacacgaacatgggggcgtggtttgaggcgcaggtggtcagggtgacgcggaaggccccctcccgggacgagccctgcagctccacgtccaggccggcgctggaggaggacgtcatttaccacgtgaaatacgacgactacccggagaacggcgtggtccagatgaactccagggacgtccgagcgcgcgcccgcaccatcatcaagtggcaggacctggaggtgggccaggtggtcatgctcaactacaaccccgacaaccccaaggagcggggcttctggtacgacgcggagatctccaggaagcgcgagaccaggacggcgcgggaactctacgccaacgtggtgctgggggatgattctctgaacgactgtcggatcatcttcgtggacgaagtcttcaagattgagcggccgggtgaagggagccccatggttgacaaccccatgagacggaagagcgggccgtcctgcaagcactgcaaggacgacgtgaacagactctgccgggtctgcgcctgccacctgtgcgggggccggcaggaccccgacaagcagctcatgtgcgatgagtgcgacatggccttccacatctactgcctggacccgcccctcagcagtgttcccagcgaggacgagtggtactgccctgagtgccggaatgatgccagcgaggtggtactggcgggagagcggctgagagagagcaagaagaaggcgaagatggcctcggccacatcgtcctcacagcgggactggggcaagggcatggcctgtgtgggccgcaccaaggaatgtaccatcgtcccgtccaaccactacggacccatcccggggatccccgtgggcaccatgtggcggttccgagtccaggtcagcgagtcgggtgtccatcggccccacgtggctggcatacacggccggagcaacgacggagcgtactccctagtcctggcggggggctatgaggatgatgtggaccatgggaattttttcacatacacgggtagtggtggtcgagatctttccggcaacaagaggaccgcggaacagtcttgtgatcagaaactcaccaacaccaacagggcgctggctctcaactgctttgctcccatcaatgaccaagaaggggccgaggccaaggactggcggtcggggaagccggtcagggtggtgcgcaatgtcaagggtggcaagaatagcaagtacgcccccgctgagggcaaccgctacgatggcatctacaaggttgtgaaatactggcccgagaaggggaagtccgggtttctcgtgtggcgctaccttctgcggagggacgatgatgagcctggcccttggacgaaggaggggaaggaccggatcaagaagctggggctgaccatgcagtatccagaaggctacctggaagccctggccaaccgagagcgagagaaggagaacagcaagagggaggaggaggagcagcaggaggggggcttcgcgtcccccaggacgggcaagggcaagtggaagcggaagtcggcaggaggtggcccgagcagggccgggtccccgcgccggacatccaagaaaaccaaggtggagccctacagtctcacggcccagcagagcagcctcatcagagaggacaagagcaacgccaagctgtggaatgaggtcctggcgtcactcaaggaccggccggcgagcggcagcccgttccagttgttcctgagtaaagtggaggagacgttccagtgtatctgctgtcaggagctggtgttccggcccatcacgaccgtgtgccagcacaacgtgtgcaaggactgcctggacagatcctttcgggcacaggtgttcagctgccctgcctgccgctacgacctgggccgcagctatgccatgcaggtgaaccagcctctgcagaccgtcctcaaccagctcttccccggctacggcaatggccggtga

SEQ ID NO: 595 - DNA, 4332 bp, Homo Sapiens
atgtacgccgtgtacaaacaggcgcatccgcccaccggtctggagttctccatgtactgcaacttcttcaacaacagcgagcgcaacctggtagtggccgggacctcgcagctctacgtgtaccgcctcaaccgcgacgccgaggctctgaccaagaatgacaggagcacagaggggaaggcccaccgggagaagctcgagcttgctgcctccttctccttctttggcaacgtcatgtccatggccagcgtgcagctggcaggagccaagcgggatgccctgctcctaagcttcaaggatgccaagctgtctgtggtggagtacgacccgggcacccatgacctgaagaccctgtcactgcactactttgaggagcctgagcttcgggacgggtttgtgcagaatgtacacacgccgcgagtgcgggtggaccccgacgggcgctgtgcagccatgcttgtctacggcacgcggctggtggtcctgcccttccgcagggagagcctggctgaggagcacgaggggctcgtgggtgaggggcagaggtccagcttcctgcccagctacatcatcgacgtgcgggccctagacgagaagctgctcaacatcatcgacctgcagttcctgcatggctactacgagcctaccctcctcatcctgtttgagcccaaccagacctggcctgggcgcgtggccgtgcggcaggacacgtgctccattgtggccatctcactgaacatcacgcagaaggtgcaccccgtcatctggtccctcaccagcctgccctttgactgcacccaggctctggctgtgcccaagcccataggtggggtggtggtgtttgccgtcaactcgctgttgtacctgaaccagagcgtccccccgtatggcgtggctctcaacagcctcaccacaggaaccacggctttcccgcttcgcacccaggagggtgtgcggatcaccctggactgcgcccaggccaccttcatctcctacgacaagatggtcatctccctcaagggcggcgagatctacgtgctgaccctcatcaccgacggcatgcgcagtgtccgagcgttccactttgacaaggcggccgccagcgtcctcaccaccagcatggtcaccatggagcccgggtacctgttcctgggttctcgcctgggcaattccctcctcctcaagtacacggagaagctgcaggagcccccggccagtgctgtccgtgaggctgccgacaaggaagagcctccctcaaagaagaagcgagtggatgcgacggccggctggtcagctgcgggtaagtcggtgccgcaggatgaggtggacgagattgaagtgtacggcagcgaggcccagtcgggaacacagctggccacctactcctttgaggtgtgtgacagcatcctgaacattggaccctgtgccaatgccgccgtgggcgagcctgccttcctctctgaagagtttcagaacagccccgagccggacctggagattgtggtttgctccggccacgggaagaacggggctttgtcggtgctgcagaagagcatccggccccaggtggtgacaacctttgagcttcccggctgctatgacatgtggacagtcatcgccccggtgcgtaaggaggaggaggacaatcccaagggggagggcacagagcaggaacccagcaccacccctgaagcagacgacgacggccgcagacacggattcctgattctgagccgggaagactccaccatgatcctgcagacggggcaggagatcatggagctggacaccagtggcttcgccactcagggccccacggtctttgctgggaacatcggggacaaccgctacattgtccaagtgtcaccactgggcatccgcctgctggaaggagtgaatcagctgcacttcatccccgtggacctgggcgcccccatcgtgcagtgcgccgtggccgacccctatgtggtcatcatgagtgccgagggccacgtcaccatgttcctgctgaagagtgactcctacggtggccgccaccaccgcctggcgctgcacaagcccccgctgcaccatcagtccaaggtgattacgctgtgcctgtaccgagacctcagcggcatgttcaccactgagagccgcctgggtggggcccgtgacgagctcgggggccgcagtggcccggaggccgagggcctgggctcagagactagccccacagtggatgacgaggaggagatgctgtatggggattcgggctccctcttcagccccagcaaggaggaggcccgaagaagcagccagccccctgctgaccgggaccctgcacccttccgggcagagcctacccactggtgcctgctggtgcgggagaatggcaccatggagatctaccagcttcccgactggcggctggtgttcctggtgaagaacttccctgtggggcagcgggtccttgtggacagctcctttggacagcccactacacagggcgaggcccgcagggaggaggccacgcgccagggggagctgcccctcgtcaaggaggtgctgctggtggcgctgggcagccgccagagcaggccctacctgctggtgcatgtggaccaagagctgcttatctacgaggccttcccccacgactctcagctcggccagggcaatctcaaagtccgctttaagaaggtccctcacaacatcaacttccgtgagaagaagccaaagccatccaagaagaaagcagaaggtggcggcgcagaggagggggctggggcccggggccgcgtggcgcgtttccgctacttcgaggatatttatggctactcaggggtcttcatctgcggcccctcccctcactggctcttggtgaccggccgaggggctctgcggctacaccccatggccatcgacggcccggtcgactctttcgctccattccacaatgtcaactgtccccgcggcttcctgtacttcaacagacagggcgagctgaggatcagtgtcctgcctgcctacctgtcctatgatgccccatggcctgtcaggaagatcccgctgcgctgcacggcccactatgtggcttaccacgtggagtctaaggtgtatgctgtggccaccagcaccaacacgccgtgtgcccgcatcccacgcatgactggcgaggagaaggagtttgagaccatcgagagagatgagcggtacatccacccccagcaggaggccttctccatccagctcatctccccggtcagctgggaggctattcccaatgccaggatcgagctgcaggagtgggagcatgtgacctgcatgaagacagtgtctctgcgcagtgaggagaccgtgtcgggcctcaaaggctacgtggccgccgggacctgcctcatgcagggggaggaggtcacgtgccgagggcggatcttgatcatggatgtgattgaggtggtgcccgagcctggccagcccttgaccaagaacaagttcaaagtcctttacgagaaggagcagaaggggcccgtgaccgccctgtgccactgcaatggccacctggtgtcggccatcggccagaagattttcctgtggagcctgcgggccagcgagctgacgggcatggccttcatcgacacgcagctctacatacaccagatgatcagcgtcaagaacttcatcctggcagccgacgtcatgaagagcatttcgctgctgcgctaccaggaggaaagcaagacgctgagcctggtgtcgcgggatgccaagcccctggaggtgtacagcgtggacttcatggtggacaatgcccagctgggttttctggtgtctgaccgcgaccgcaacctcatggtgtacatgtacctgcccgaagccaaggagagtttcgggggcatgcgcctgctgcgtcgggcagacttccacgtgggtgcccacgtgaacacgttctggaggaccccgtgccggggggccactgaagggctcagcaaaaagtcggtcgtgtgggagaataagcacatcacgtggtttgccaccctggacggcggcatcgggctgctgctgcccatgcaggagaagacctaccggcggctgctgatgctgcagaacgcgctgaccaccatgctgccacaccacgccggcctcaacccccgcgccttccggatgctgcacgtggaccgccgcaccctccagaatgccgtgcgcaacgtgctggatggggagctgctcaaccgctacctgtacctgagcaccatggagcgcagcgagctagccaagaagatcggcaccacaccagacataatcctggacgacttgctggagacggaccgcgtcaccgcccacttctag

SEQ ID NO: 596 - DNA, 1203 bp, Homo Sapiens
atggcagccgggggtctgagccgctccgagcgcaaagcggcggagcgggtccggaggttgcgggaggagcagcagagggagcgcctccgccaggtgtcgcgcatcctgaggaaggcggcggcggagcgcagcgccgaggagggccggctgctggccgagagcgcggacctggtaacggagctgcagggccggagccggcggcgcgagggcctgaagcggcggcaggaggaggtgtgcgacgacccggaggagctgcgggggaaggtccgggagctggccagcgccgtccggaacgccaaatacttggtcgtctacacaggcgcgggaatcagcacggcagcgtctatcccagactaccggggccctaatggagtgtggacactgcttcagaaagggagaagcgttagtgctgccgacctgagcgaggccgagccaaccctcacccacatgagcatcacccgtctgcatgagcagaagctggtgcagcatgtggtgtctcagaactgtgacgggctccacctgaggagtgggctgccgcgcacggccatctccgagctccacgggaacatgtacattgaagtctgtacctcctgcgttcccaacagggagtacgtgcgggtgttcgatgtgacggagcgcactgccctccacagacaccagacaggccggacctgccacaagtgtgggacccagctgcgggacaccattgtgcactttggggagagggggacgttggggcagcctctgaactgggaagcggcgaccgaggctgccagcagagcagacaccatcctgtgtctagggtccagcctgaaggttctaaagaagtacccacgcctctggtgcatgaccaagccccctagccggcggccgaagctttacatcgtgaacctgcagtggaccccgaaggatgactgggctgccctgaagctacatgggaagtgtgatgacgtcatgcggctcctcatggccgagctgggcttggagatccccgcctatagcaggtggcaggatcccattttctcactggcgactcccctgcgtgctggtgaagaaggcagccacagtcggaagtcgctgtgcagaagcagagaggaggccccgcctggggaccggggtgcaccgcttagctcggcccccatcctagggggctggtttggcaggggctgcacaaaacgcacaaaaaggaagaaagtgacgtaa

SEQ ID NO: 597 - DNA, 573 bp, Homo Sapiens
atggcaggcagccggctggaaaccgtagggagcatcttctctcggactcgggacctggttcgggccggggtgctgaaggagaagcccctgtggtttgacgtatatgacgcctttcccccgctgagggagcccgtcttccaaaggcctcgagtgcgatatggcaaagccaaagctcccatccaagacatctggtaccacgaggatcggattagagcgaagttttattcagtgtatgggtctggtcaaagagcttttgatctattcaatccaaacttcaagtctacctgtcaacggtttgtggagaagtacactgagctacagaaacttggagaaacagatgaagagaagttatttgtggaaacagggaaggctttattggcagaaggtgtcattttaagacgagtaggcgaagcaaggactcaacacggaggtagtcacgtttcccggaaatccgaacacttgagtgtcagaccacagactgcgttggaagaaaacgagactcagaaagaagttccacaggaccagcatttggaggcacctgcagaccagtcgaaaggtctcttgcctccctga

SEQ ID NO: 598 - DNA, 1404 bp, Homo Sapiens
atgtggcgatgtccactggggctactgctgttgctgccgctggctggccacttggctctgggtgcccagcagggtcgtgggcgccgggagctagcaccgggtctgcacctgcggggcatccgggacgcgggaggccggtactgccaggagcaggacctgtgctgccgcggccgtgccgacgactgtgccctgccctacctgggcgccatctgttactgtgacctcttctgcaaccgcacggtctccgactgctgccctgacttctgggacttctgcctcggcgtgccacccccttttcccccgatccaaggatgtatgcatggaggtcgtatctatccagtcttgggaacgtactgggacaactgtaaccgttgcacctgccaggagaacaggcagtggcagtgtgaccaagaaccatgcctggtggatccagacatgatcaaagccatcaaccagggcaactatggctggcaggctgggaaccacagcgccttctggggcatgaccctggatgagggcattcgctaccgcctgggcaccatccgcccatcttcctcggtcatgaacatgcatgaaatttatacagtgctgaacccaggggaggtgcttcccacagccttcgaggcctctgagaagtggcccaacctgattcatgagcctcttgaccaaggcaactgtgcaggctcctgggccttctccacagcagctgtggcatccgatcgtgtctcaatccattctctgggacacatgacgcctgtcctgtcgccccagaacctgctgtcttgtgacacccaccagcagcagggctgccgcggtgggcgtctcgatggtgcctggtggttcctgcgtcgccgaggggtggtgtctgaccactgctaccccttctcgggccgtgaacgagacgaggctggccctgcgcccccctgtatgatgcacagccgagccatgggtcggggcaagcgccaggccactgcccactgccccaacagctatgttaataacaatgacatctaccaggtcactcctgtctaccgcctcggctccaacgacaaggagatcatgaaggagctgatggagaatggccctgtccaagccctcatggaggtgcatgaggacttcttcctatacaagggaggcatctacagccacacgccagtgagccttgggaggccagagagataccgccggcatgggacccactcagtcaagatcacaggatggggagaggagacgctgccagatggaaggacgctcaaatactggactgcggccaactcctggggcccagcctggggcgagaggggccacttccgcatcgtgcgcggcgtcaatgagtgcgacatcgagagcttcgtgctgggcgtctggggccgcgtgggcatggaggacatgggtcatcactga

SEQ ID NO: 599 - DNA, 1032 bp, Homo Sapiens
atggcgggagggagaccgcatctgaagaggagtttctccatcatcccctgctttgtcttcgtggagtcggtgctgctgggcattgtgatcctgcttgcttaccgcctggagttcacggacaccttccctgtgcacacccagggattcttctgctatgacagtacctacgccaagccctacccagggcctgaggctgccagccgagtgcctcctgctcttgtctacgcactggtcactgccgggcccaccctcacgatcctgctgggagagctggcgcgtgcctttttccctgcaccaccttcagccgtcccagtcatcggggagagcaccatcgtgtctggggcctgctgccgcttcagccccccagtgcggaggctggtccgcttcctgggggtctactccttcggcctcttcaccacgaccatcttcgccaacgcggggcaggtggtgaccggcaatcccacgccacacttcctgtccgtgtgccgccccaactacacggccctgggctgcctgccaccttctccggatcggccaggtcccgaccgctttgtcactgaccagggtgcctgcgctggcagtcccagcctcgtggccgccgcgcgccgcgccttcccctgcaaggatgcggccctctgcgcctacgcggtcacctacacagcgatgtacgtgactctcgtgttccgcgtgaagggctcccgcctggtcaaaccctcgctctgcctggccttgctgtgcccggccttcctggtgggcgtggtccgcgtggccgagtaccgaaaccactggtcggacgtgctggctggcttcctgacaggggcggccatcgccacctttttggtcacctgcgttgtgcataactttcagagccggccaccctctggccgaaggctctctccctgggaggacctgggccaagcccccaccatggatagccccctcgaaaagaacccgaggtctgcaggccgcattcgacaccggcacggctcaccccatccaagtcgcagaactgcgcccgccgtggccacctga

SEQ ID NO: 600 - DNA, 1056 bp, Homo Sapiens
atggcggtccccgctgcagccatggggccctcggcgttgggccagagcggccccggctcgatggccccgtggtgctcagtgagcagcggcccgtcgcgctacgtgcttgggatgcaggagctgttccggggccacagcaagacgcgcgagttcctggcgcacagcgccaaggtgcactcggtggcctggagttgcgacgggcgtcgcctagcctcggggtccttcgacaagacggccagcgtcttcttgctggagaaggaccggttggtcaaagaaaacaattatcggggacatggggatagtgtggaccagctttgttggcatccaagtaatcctgacctatttgttacggcgtccggagataaaaccattcgcatctgggatgtgaggactacaaaatgcattgccactgtgaacactaaaggggagaacattaatatctgctggagtcctgatgggcagaccattgctgtaggcaacaaggatgatgtggtgacctttattgatgccaagacacaccgttccaaagcagaagagcagttcaagttcgaggtcaacgaaatctcctggaacaatgacaataatatgttcttcctgacaaatggcaatggttgtatcaacatcctcagctacccagaactgaagcctgtgcagtccatcaacgcccatccttccaactgcatctgtatcaagtttgaccccatggggaagtactttgccacaggaagtgcagatgctttggtcagcctctgggatgtggatgagttagtgtgtgttcggtgcttttccaggctggattggcctgtaagaaccctcagtttcagccatgatgggaaaatgctggcgtcagcatcggaagatcattttattgacattgctgaagtggagacaggggacaaactatgggaggtacagtgtgagtctccgaccttcacagtggcgtggcaccccaaaaggcctctgctggcatttgcctgtgatgacaaagacggcaaatatgacagcagccgggaagccggaactgtgaagctgtttgggcttcctaatgattcttga

SEQ ID NO: 601 - DNA, 1557 bp, Homo Sapiens
atggaccaaacgcccccggcgcgtcctgaatatctggtctcagggattcgaactccccctgtgaggaggaacagcaaactggccaccctgggcaggatcttcaaaccctggaaatggaggaaaaagaaaaacgaaaaactgaagcagacaacgtcagcgctggagaagaagatggccggcaggcaaggccgagaggagctcatcaagaaggggctgctggagatgatggagcaggatgctgaaagcaaaacttgcaaccccgatggaggaccccgatctgtacagagtgaaccacccactcccaagtcggagacgctgacttcagaagatgcccagcccggaagccccttggccactgggacggaccaggtctccctggacaagccactgtcctcagctgcccacttggacgatgcagccaagatgccttctgcatccagtggtgaagaagcagacgctggcagcctcctgcccaccaccaatgagctctcccaagccttagctggggctgactccctggacagtcctcccagacctctggagagatccgtgggccagctccccagccccccactgctgcccactccgccacccaaggcaagctccaaaaccacaaaaaatgtcacaggccaagccacactcttccaagcctccagcatgaagagtgccgacccttccctccggggccagctctccacacccacggggtctccgcatctcaccacggtccaccggcctcttcccccaagccgcgtcattgaggagctgcacagggcgctggccacgaagcaccgccaggacagttttcaaggaagagaaagtaaagggtctccaaagaagcggctggatgtccgtctgtcgagaacgtccagcgtggagcggggcaaggagagggaggaggcttggagctttgacggggcattggagaacaagcgaactgccgctaaggaatctgaggagaacaaggagaacctgatcataaattctgaactcaaagacgacttgcttttgtatcaggacgaggaggcgctgaacgactccattatttctggaacactgccacggaaatgcaagaaggagctcctggccgtgaagctaaggaaccggccaagcaaacaggaactagaagaccggaacattttccccagaaggactgatgaagaaagacaggagatccggcagcagatcgagatgaagctttccaaacggctgagccaaagacctgccgtggaagagctggagagaagaaatatcttgaaacaaaggaatgatcagacagagcaggaagaaagaagagaaatcaagcaaagattgacaagaaagcttaatcagagacccactgttgatgaattaagagacagaaaaattctgatacgattcagtgattacgtggaagtagcaaaagcgcaggactatgacaggagggcagacaaaccctggacgagactgtcagcagcagataaggcagcaattcgtaaagaattaaatgagtacaaaagtaatgaaatggaggtacatgcatcaagcaagcacttgacaagattccacaggccatag

SEQ ID NO: 602 - DNA, 1938 bp, Homo Sapiens
atgttcacgctctccctcctgagccggggccacgggaagctgggccagggcaaacagaagttagaagtctactttgaaccagaggattacttgaactggaggtccccagaagactatgttcctgccagcaaacctcaagataagaacaatgccagtcagcactcctggagcctctttctccctaaaactttcagtactagaaagggtgccctgatcctgtactcagaaggtcttgccatttcggcatggacacccaaagagaggagaaaaggcccctactgccccagaggtccctggaggaagctggatcttgaactgcacacacttcaagacctcaaagaagccatcctggcatatggaaggcagcagggagagcaggacagagcctggcaaccatacctccacttccgaagccagctggagagccaggcccaacggcagatccagccagggcattcagccaagagatacctccgaggcctcctgcggacttggcccccagacgccatgtataggctctggtgcgcaggatacatcaaggattctgtgctactccaggacagtcaacttaatgtaccaaagaagctcaggccacaacaagatctttcaggtgtacccccaaaataccatctcctgcctgtcttcccttcattttggattcaacaaggaaaatcttttgaacaacgtcaacagggcctggatgaaggggaagctggagctgctggacacgtggaccagggccctctagccaagaaccatggcagtcaggggactcgcttgccaccacgcaggaagcagccctggcaggaagatgaaacgcaggcagaggacacgtcaatagagaatcacctttgtttatatgcttcaaaggaaagctacaatgaaaagacacagcaaacctccaggaaggcctttgggcatggccgcatcgatcactcttggctcccaagtgacaaatcccacattacattctgtggaggcgccttccctaataggaaggcagatctcagcgataaacaaaggaacgtgaaactccacaaggccagaagcagccacttgttacaggtgcttcctgctgaaagaagcctcttccctcctgtagcatctgccactggctccagaataatcacccctggggaagtgaagaagaaaaaggcaccaaaggctttgaaattacctcctatctcagaagaaccacccagagtcttggagcccctgaagagccaatttaaagccaatgagcccccaacagagctcttcatcttaccggtggagattcattaccacaccaaacaacccccaaaagagaaagcccacagaagaggtgctccacaccctgagtcagaaccagaaagcagcgaagaatccacacctgtgtggagacctcccctgaagcatgcgtccttagaaacaccatgggagttaacagtgcatctcccagtggacgcgagcagggacacactctcacctcaagatgatgatgccccacctcacgatgtggccccaccattggatcttctacccccgattaaaggaaaaaaaagtcctgagagccagaagggcgtggacagccctaggacatcagaccacaacagccccccaagtctcccgaacatgagagtgcccaggagggcactgccagcagctcaagattccagcgaccctacactgggacacttcttgctgggtccagatggagaaaaagtctgcctgtccctcccagggcatacccaaaccgaggcgcttccatcgggtaaagcctatgaatctgtcaattcaaatatcagccatgaagaggaagggcctagtagtcagcatttcctaaaagagtctcactctgttgtgtccggaaatggtgggttcttggtctcgctgacttcaagaatgaagccacagaccttcgtgcaaacactgaacctagagccaatcttcacatga

SEQ ID NO: 603 - DNA, 867 bp, Homo Sapiens
atgtcctgtacagttagagatgtttatgattacttccgagctgtcctgcagcgtgatgaaagaagtgaacgagcttttaagctaacccgggatgctattgagttaaatgcagccaattatacagtgtggcatttccggagagttcttttgaagtcacttcagaaggatctacatgaggaaatgaactacatcactgcaataattgaggagcagcccaaaaactatcaagtttggcatcataggcgagtattagtggaatggctaagagatccatctcaggagcttgaatttattgctgatattcttaatcaggatgcaaagaattatcatgcctggcagcatcgacaatgggttattcaggaatttaaactttgggataatgagctgcagtatgtggaccaacttctgaaagaggatgtgagaaataactctgtctggaaccaaagatacttcgttatttctaacaccactggctacaatgatcgtgctgtattggagagagaagtccaatacactctggaaatgattaaactagtaccacataatgaaagtgcatggaactatttgaaagggattttgcaggatcgtggtctttccaaatatcctaatctgttaaatcaattacttgatttacaaccaagtcatagttccccctacctaattgcctttcttgtggatatctatgaagacatgctagaaaatcagtgtgacaataaggaagacattcttaataaagcattagagttatgtgaaatcctagctaaagaaaaggacactataagaaaggaatattggagatacattggaagatcccttcaaagcaaacacagcacagaaaatgactcaccaacaaatgtacagcaataa

SEQ ID NO: 604 - DNA, 1824 bp, Homo Sapiens
atgccgaggaagaagccattcagcgtgaagcagaagaagaagcagttgcaggacaaacgggagcggaagagagggcttcaagatgggctgcgctccagttccaacagccgcagcgggagccgggagcggcgagaggaacagaccgacacctcggacggggagtctgtgacccatcatatccgcaggcttaaccagcagccttctcaggggctgggtccacgaggctacgacccaaatcgataccgactgcattttgagagagacagcagggaggaggtagagaggagaaagagagcagcccgggagcaagttctacagccggtcagtgctgagttgttggagctggacatccgggaggtgtatcagcctggctcagttctggactttcctcgacgtcctccttggagctatgagatgtccaaggagcaactaatgagccaagaggaacggagcttccaagactatcttgggaagattcatggggcttactcctctgagaaactcagctactttgagcacaatctggagacatggaggcagctgtggcgggtgttagagatgtctgacatcgtcctgcttatcactgatatccgacatccagttgtgaatttcccgccagcactttatgagtatgtgactggagaacttggactggccctggtgctggttttgaacaaggtggatctggccccgccagctcttgtggttgcctggaagcattatttccatcaacactatccccagctccacgtcgtccttttcacctcttttcctcgggacccccgcaccccacaggatcctagtagtgtcttgaagaagagtcggaggcgggggagaggatggactcgggccctggggccagagcagttgctgagagcctgtgaagccatcactgtggggaaagtggacttgagcagctggcgggagaagattgctcgggatgtggctggggccacctggggtaatggctctggggaggaggaggaagaggaggatggcccagcagtcctggtggagcagcagactgattcagcaatggagccaactggcccaacccaagagcgctacaaggatggggtggtgaccatcggctgtgtgggtttccctaatgtgggaaagtcctcgctgatcaatgggctggtggggcggaaagtcgtgagtgtctccagaaccccgggccatacccgatactttcagacctactttcttaccccctctgtgaagctctgtgactgcccaggcctcatcttcccatctcttctgcctaggcagttgcaggttctggcagggatctaccctatcgcccagatccaggagccctacactgctgtgggctacctggcctcccgaattcccgtgcaggccctgctccacctgcgccacccagaggctgaggacccctcagcggaacacccctggtgtgcctgggacatctgtgaagcctgggcagagaaacgtggttacaagacagccaaggcggctcggaatgatgtgtacagagcagccaacagtctcttgcggctggcagtggacggccgcctcagcctgtgttttcatcccccaggctacagtgaacagaaaggcacctgggagtcccatccagagaccacggagctggtggttttgcagggcagggtggggccagcaggtgacgaggaggaggaggaagaggaagagctgagcagctcctgtgaggaggagggagaggaggaccgggatgcggatgaggagggagaaggggatgaggagaccccaacctcggctccagggtccagcctggctggccgaaacccttatgccctgctgggtgaggatgagtgctga

SEQ ID NO: 605 - DNA, 630 bp, Homo Sapiens
atgggtaaaggagaccccaacaagccgcggggcaaaatgtcctcgtacgccttcttcgtgcagacctgccgggaagagcacaagaagaaacacccggactcttccgtcaatttcgcggaattctccaagaagtgttcggagagatggaagaccatgtctgcaaaggagaagtcgaagtttgaagatatggcaaaaagtgacaaagctcgctatgacagggagatgaaaaattacgttcctcccaaaggtgataagaaggggaagaaaaaggaccccaatgctcctaaaaggccaccatctgccttcttcctgttttgctctgaacatcgcccaaagatcaaaagtgaacaccctggcctatccattggggatactgcaaagaaattgggtgaaatgtggtctgagcagtcagccaaagataaacaaccatatgaacagaaagcagctaagctaaaggagaaatatgaaaaggatattgctgcatatcgtgccaagggcaaaagtgaagcaggaaagaagggccctggcaggccaacaggctcaaagaagaagaacgaaccagaagatgaggaggaggaggaggaagaagaagatgaagatgaggaggaagaggatgaagatgaagaataa

SEQ ID NO: 606 - DNA, 2736 bp, Homo Sapiens
atggacggtgccatggggcctcgggggctgctgttgtgcatgtacctggtatctctcctcatcctgcaggccatgcctgccctgggctcggctacaggcaggtccaagagcagcgagaagcgacaggctgtggacaccgctgtcgatggcgtgttcatccggagtttgaaagtcaactgcaaagtcacctctcgcttcgcccactatgttgtcaccagccaagtggtcaacactgccaatgaagccagggaagtggccttcgacctggaaatccccaagacagcattcatcagtgactttgccgttacagcagatggaaacgcatttatcggagacataaaggacaaggtgactgcatggaagcagtaccggaaagcagctatctcaggagagaatgccggccttgtcagggcctcggggagaactatggagcaattcaccatccacctcaccgtcaatccccagagcaaggtcacgtttcagctgacttatgaggaagtgctgaagagaaaccatatgcagtatgaaattgtcatcaaagtcaagcccaagcagctggtgcatcattttgagattgatgtggacatcttcgagccccaggggatcagcaagctggatgcccaggcctctttcctgccgaaggaactggcagcccaaactatcaagaagtccttctcaggaaaaaagggtcatgtgctgttccgtcccaccgtgagccagcagcagtcctgccccacatgctctacatccttactgaacgggcacttcaaggtgacctacgatgtcagtcgagacaagatctgcgacctcctggtggccaataaccactttgcccacttctttgccccccaaaacctgacaaacatgaacaagaacgtggtttttgtgattgacatcagtggctccatgagaggccagaaagtgaagcagaccaaggaggcactccttaaaattctgggggacatgcagccaggggactactttgacctggttctttttgggactcgagtacaatcgtggaagggctcgctggtgcaagcatctgaggccaacctacaagcagctcaagactttgtgcggggcttttccctggatgaggccacaaacctgaatggaggtttgctccggggaattgagatcttgaaccaagttcaggaaagcctcccagaactcagcaaccatgcctcaatactcatcatgttgacagatggcgatcccacagagggggtgacggaccgttcccaaatcctcaagaacgtccgcaacgccatccggggcaggttcccgctctacaacctgggtttcggccacaatgtggactttaactttctggaggtcatgtccatggagaacaacggacgggcccagagaatctacgaggaccatgatgccacccagcagctgcagggtttctacagccaggtagccaaacccctgctggtggatgtggatttgcagtacccccaggatgctgtcttggccctgacccagaaccaccataaacagtactacgaaggctcagagattgtggtggccgggcgcattgctgacaacaaacagagcagcttcaaggctgatgtgcaggcccatggggagggacaagaattcagtataacctgcctagtggatgaggaggagatgaagaaactgctccgagagcgtggccacatgctggagaaccacgtcgagcgcctctgggcctacctcaccatccaggagctgctggccaagcggatgaaggtggacagggaggagagggccaacctgtcatcccaggccctgcagatgtcgctggactatgggtttgtgaccccactgacctccatgagcatcaggggcatggcggaccaggacggcctgaagcccaccatcgacaagccctcagaggattctccgcctttggagatgctgggacccagaaggacgttcgtgctgtcagccttgcagccttctcctactcattccagctccaatacccagcggctgccagaccgagtgaccggcgtggacacagaccctcacttcatcatccacgtgccccagaaagaggacaccctgtgcttcaacatcaatgaggagcctggtgttatcctgagcctggtacaggaccccaacacaggcttctcagtgaatggacagctcattggcaacaaggccaggagccctgggcagcatgacggcacgtacttcgggcggctgggaatcgcaaaccctgccacggactttcagttggaagtgactcctcagaacattacgctgaaccccggctttggtgggcctgtgttttcctggagggaccaagctgtgctgcggcaggacggggtggtggtgaccatcaacaagaagaggaacctggtggtgtctgtggacgacggtggcacctttgaggttgttttgcaccgagtgtggaaggggagctcggtccaccaggacttcctgggcttctatgtgctggacagtcatcggatgtcagcccggacgcacgggctgctggggcaatttttccaccccatcggttttgaagtgtctgacatccacccaggctctgaccccacaaagccagatgccacgatggtggtgaggaaccgccggctcacggtcaccaggggtttgcaaaaagactacagcaaggacccgtggcatggggccgaggtgtcctgctggttcattcacaacaatggggctggactcatcgatggtgcctacactgattatatcgtccccgacatcttctga

SEQ ID NO: 607 - DNA, 5361 bp, Homo Sapiens
atggggcttctccagttgctagctttcagtttcttagccctgtgcagagcccgagtgcgcgctcaggaacccgagttcagctacggctgcgcagaaggcagctgctatcccgccacgggcgaccttctcatcggccgagcacagaagctttcggtgacctcgacgtgcgggctgcacaagcccgaaccctactgtatcgtcagccacttgcaggaggacaaaaaatgcttcatatgcaattcccaagatccttatcatgagaccctgaatcctgacagccatctcattgaaaatgtggtcactacatttgctccaaaccgccttaagatttggtggcaatctgaaaatggtgtggaaaatgtaactatccaactggatttggaagcagaattccattttactcatctcataatgactttcaagacattccgtccagctgctatgctgatagaacgatcgtccgactttgggaaaacctggggtgtgtatagatacttcgcctatgactgtgaggcctcgtttccaggcatttcaactggccccatgaaaaaagtcgatgacataatttgtgattctcgatattctgacattgaaccctcaactgaaggagaggtgatatttcgtgctttagatcctgctttcaaaatagaagatccttatagcccaaggatacagaatttattaaaaattaccaacttgagaatcaagtttgtgaaactgcatactttgggagataaccttctggattccaggatggaaatcagagaaaagtattattatgcagtttatgatatggtggttcgaggaaattgcttctgctatggtcatgccagcgaatgtgcccctgtggatggattcaatgaagaagtggaaggaatggttcacggacactgcatgtgcaggcataacaccaagggcttaaactgtgaactctgcatggatttctaccatgatttaccttggagacctgctgaaggccgaaacagcaacgcctgtaaaaaatgtaactgcaatgaacattccatctcttgtcactttgacatggctgtttacctggccacggggaacgtcagcggaggcgtgtgtgatgactgtcagcacaacaccatggggcgcaactgtgagcagtgcaagccgttttactaccagcacccagagagggacatccgagatcctaatttctgtgaacgatgtacgtgtgacccagctggctctcaaaatgagggaatttgtgacagctatactgatttttctactggtctcattgctggccagtgtcggtgtaaattaaatgtggaaggagaacattgtgatgtttgcaaagaaggcttctatgatttaagcagtgaagatccatttggttgtaaatcttgtgcttgcaatcctctgggaacaattcctggagggaatccttgtgattccgagacaggtcactgctactgcaagcgtctggtgacaggacagcattgtgaccagtgcctgccagagcactggggcttaagcaatgatttggatggatgtcgaccatgtgactgtgaccttgggggagccttaaacaacagttgctttgcggagtcaggccagtgctcatgccggcctcacatgattggacgtcagtgcaacgaagtggaacctggttactactttgccaccctggatcactacctctatgaagcggaggaagccaacttggggcctggggttagcatagtggagcggcaatatatccaggaccggattccctcctggactggagccggcttcgtccgagtgcctgaaggggcttatttggagtttttcattgacaacataccatattccatggagtacgacatcctaattcgctacgagccacagctacccgaccactgggaaaaagctgtcatcacagtgcagcgacctggaaggattccaaccagcagccgatgtggtaataccatccccgatgatgacaaccaggtggtgtcattatcaccaggctcaagatatgtcgtccttcctcggccggtgtgctttgagaagggaacaaactacacggtgaggttggagctgcctcagtacacctcctctgatagcgacgtggagagcccctacacgctgatcgattctcttgttctcatgccatactgtaaatcactggacatcttcaccgtgggaggttcaggagatggggtggtcaccaacagtgcctgggaaacctttcagagataccgatgtctagagaacagcagaagcgttgtgaaaacaccgatgacagatgtttgcagaaacatcatctttagcatttctgccctgttacaccagacaggcctggcttgtgaatgcgaccctcagggttcgttaagttccgtgtgtgatcccaacggaggccagtgccagtgccggcccaacgtggttggaagaacctgcaacagatgtgcacctggaacttttggctttggccccagtggatgcaaaccttgtgagtgccatctgcaaggatctgtcaatgccttctgcaatcccgtcactggccagtgccactgtttccagggagtgtatgctcggcagtgtgatcggtgcttacctgggcactggggctttccaagttgccagccctgccagtgcaatggccacgccgatgactgcgacccagtgactggggagtgcttgaactgccaggactacaccatgggtcataactgtgaaaggtgcttggctggttactatggcgaccccatcattgggtcaggagatcactgccgcccttgcccttgcccagatggtcccgacagtggacgccagtttgccaggagctgctaccaagatcctgttactttacagcttgcctgtgtttgtgatcctggatacattggttccagatgtgacgactgtgcctcaggatactttggcaatccatcagaagttggggggtcgtgtcagccttgccagtgtcacaacaacattgacacgacagacccagaagcctgtgacaaggagactgggaggtgtctcaagtgcctgtaccacacggaaggggaacactgtcagttctgccggtttggatactatggtgatgccctccagcaggactgtcgaaagtgtgtctgtaattacctgggcaccgtgcaagagcactgtaacggctctgactgccagtgcgacaaagccactggtcagtgcttgtgtcttcctaatgtgatcgggcagaactgtgaccgctgtgcgcccaatacctggcagctggccagtggcactggctgtgacccatgcaactgcaatgctgctcattccttcgggccatcttgcaatgagttcacggggcagtgccagtgcatgcctgggtttggaggccgcacctgcagcgagtgccaggaactcttctggggagaccccgacgtggagtgccgagcctgtgactgtgaccccaggggcattgagacgccacagtgtgaccagtccacgggccagtgtgtctgcgttgagggtgttgagggtccacgctgtgacaagtgcacgcgagggtactcgggggtcttccctgactgcacaccctgccaccagtgctttgctctctgggatgtgatcattgccgagctgaccaacaggacacacagattcctggagaaagccaaggccttgaagatcagtggtgtgatcgggccttaccgtgagactgtggactcggtggagaggaaagtcagcgagataaaagacatcctggcgcagagccccgcagcagagccactgaaaaacattgggaatctctttgaggaagcagagaaactgattaaagatgttacagaaatgatggctcaagtagaagtgaaattatctgacacaacttcccaaagcaacagcacagccaaagaactggattctctacagacagaagccgaaagcctagacaacactgtgaaagaacttgctgaacaactggaatttatcaaaaactcagatattcggggtgccttggatagcattaccaagtatttccagatgtctcttgaggcagaggagagggtgaatgcctccaccacagaacccaacagcactgtggagcagtcagccctcatgagagacagagtagaagacgtgatgatggagcgagaatcccagttcaaggaaaaacaagaggagcaggctcgcctccttgatgaactggcaggcaagctacaaagcctagacctttcagccgctgccgaaatgacctgtggaacacccccaggggcctcctgttccgagactgaatgtggcgggccaaactgcagaactgacgaaggagagaggaagtgtggggggcctggctgtggtggtctggttactgttgcacacaacgcctggcagaaagccatggacttggaccaagatgtcctgagtgccctggctgaagtggaacagctctccaagatggtctctgaagcaaaactgagggcagatgaggcaaaacaaagtgctgaagacattctgttgaagacaaatgctaccaaagaaaaaatggacaagagcaatgaggagctgagaaatctaatcaagcaaatcagaaactttttgacccaggatagtgctgatttggacagcattgaagcagttgctaatgaagtattgaaaatggagatgcctagcaccccacagcagttacagaacttgacagaagatatacgtgaacgagttgaaagcctttctcaagtagaggttattcttcagcatagtgctgctgacattgccagagctgagatgttgttagaagaagctaaaagagcaagcaaaagtgcaacagatgttaaagtcactgcagatatggtaaaggaagctctggaagaagcagaaaaggcccaggtcgcagcagagaaggcaattaaacaagcagatgaagacattcaaggaacccagaacctgttaacttcgattgagtctgaaacagcagcttctgaggaaaccttgttcaacgcgtcccagcgcatcagcgagttagagaggaatgtggaagaacttaagcggaaagctgcccaaaactccggggaggcagaatatattgaaaaagtagtatatactgtgaagcaaagtgcagaagatgttaagaagactttagatggtgaacttgatgaaaagtataaaaaagtagaaaatttaattgccaaaaaaactgaagagtcagctgatgccagaaggaaagccgaaatgctacaaaatgaagcaaaaactcttttagctcaagcaaatagcaagctgcaactgctcaaagatttagaaagaaaatatgaagacaatcaaagatacttagaagataaagctcaagaattagcaagactggaaggagaagtccgttcactcctaaaggatataagccagaaagttgctgtgtatagcacatgcttgtaa

SEQ ID NO: 608 - DNA, 2178 bp, Homo Sapiens
atggggctgtggtgggtcacagtgcagcctccagccagaaggatggggtggctcccactcctgctgcttctgactcaatgcttaggggtccctgggcagcgctcgccattgaatgacttccaagtgctccggggcacagagctacagcacctgctacatgcggtggtgcccgggccttggcaggaggatgtggcagatgctgaagagtgtgctggtcgctgtgggcccttaatggactgccgggccttccactacaacgtgagcagccatggttgccaactgctgccatggactcaacactcgccccacacgaggctgcggcgttctgggcgctgtgacctcttccagaagaaagactacgtacggacctgcatcatgaacaatggggttgggtaccggggcaccatggccacgaccgtgggtggcctgccctgccaggcttggagccacaagttcccaaatgatcacaagtacacgcccactctccggaatggcctggaagagaacttctgccgtaaccctgatggcgaccccggaggtccttggtgctacacaacagaccctgctgtgcgcttccagagctgcggcatcaaatcctgccgggaggccgcgtgtgtctggtgcaatggcgaggaataccgcggcgcggtagaccgcacggagtcagggcgcgagtgccagcgctgggatcttcagcacccgcaccagcaccccttcgagccgggcaagttcctcgaccaaggtctggacgacaactattgccggaatcctgacggctccgagcggccatggtgctacactacggatccgcagatcgagcgagagttctgtgacctcccccgctgcgggtccgaggcacagccccgccaagaggccacaactgtcagctgcttccgcgggaagggtgagggctaccggggcacagccaataccaccactgcgggcgtaccttgccagcgttgggacgcgcaaatcccgcatcagcaccgatttacgccagaaaaatacgcgtgcaaagaccttcgggagaacttctgccggaaccccgacggctcagaggcgccctggtgcttcacactgcggcccggcatgcgcgcggccttttgctaccagatccggcgttgtacagacgacgtgcggccccaggactgctaccacggcgcaggggagcagtaccgcggcacggtcagcaagacccgcaagggtgtccagtgccagcgctggtccgctgagacgccgcacaagccgcagttcacgtttacctccgaaccgcatgcacaactggaggagaacttctgccggaacccagatggggatagccatgggccctggtgctacacgatggacccaaggaccccattcgactactgtgccctgcgacgctgcgctgatgaccagccgccatcaatcctggaccccccagaccaggtgcagtttgagaagtgtggcaagagggtggatcggctggatcagcggcgttccaagctgcgcgtggttgggggccatccgggcaactcaccctggacagtcagcttgcggaatcggcagggccagcatttctgcggggggtctctagtgaaggagcagtggatactgactgcccggcagtgcttctcctcctgccatatgcctctcacgggctatgaggtatggttgggcaccctgttccagaacccacagcatggagagccaagcctacagcgggtcccagtagccaagatggtgtgtgggccctcaggctcccagcttgtcctgctcaagctggagagatctgtgaccctgaaccagcgtgtggccctgatctgcctgccccctgaatggtatgtggtgcctccagggaccaagtgtgagattgcaggctggggtgagaccaaaggtacgggtaatgacacagtcctaaatgtggccttgctgaatgtcatctccaaccaggagtgtaacatcaagcaccgaggacgtgtgcgggagagtgagatgtgcactgagggactgttggcccctgtgggggcctgtgagggtgactacgggggcccacttgcctgctttacccacaactgctgggtcctggaaggaattataatccccaaccgagtatgcgcaaggtcccgctggccagctgtcttcacgcgtgtctctgtgtttgtggactggattcacaaggtcatgagactgggttag

SEQ ID NO: 609 - DNA, 1323 bp, Homo Sapiens
atgggtcaaagtcagagtggtggtcatggtcctggaggtggcaagaaggatgacaaggacaagaaaaagaaatatgaacctcctgtaccaactagagtggggaaaaagaagaagaaaacaaagggaccagatgctgccagcaaactgccactggtgacacctcacactcagtgccggttaaaattactgaagttagagagaattaaagactatcttctcatggaggaagaattcattagaaatcaggaacaaatgaaaccattagaagaaaagcaagaggaggaaagatcaaaagtggatgatctgagggggaccccgatgtcagtaggaaccttggaagagatcattgatgacaatcatgccatcgtgtctacatctgtgggctcagaacactacgtcagcattctttcatttgtagacaaggatctgctggaacctggctgctcggtcctgctcaaccacaaggtgcatgccgtgataggggtgctgatggatgacacggatcccctggtcacagtgatgaaggtagaaaaggccccccaggagacctatgcagatattggggggttggacaaccaaattcaggaaattaaggaatctgtggagcttcctctcacccatcctgaatattatgaagagatgggtataaagcctcctaagggggtcattctctatggtccacctggcacaggtaaaaccttgttagccaaagcagtagcaaaccaaacctcagccactttcttgagagtggttggctctgaacttattcagaagtacctaggtgatgggcccaaactcgtacgggaattgttccgagttgctgaagaacatgcaccgtccatcgtgtttattgatgaaattgacgccattgggacaaaaagatatgactccaattctggtggtgagagagaaattcagcgaacaatgttggaactgctgaaccagttggatggatttgattctaggggagatgtgaaagttatcatggccacaaaccgaatagaaactttggatccagcacttatcagaccaggccgcattgacaggaagattgagttccccctgcctgatgaaaagacgaagaagcgcatctttcagattcacacaagcaggatgacgctggctgatgatgtaaccctggacgacctgatcatggctaaagatgacctctctggtgctgacatcaaggcaatctgtacagaagctggtctgatggccttaagagaacgtagaatgaaagtaacaaatgaagacttcaaaaaatctaaagaaaatgttctttataagaaacaggaaggcacccctgaggggctgtatctctaa

SEQ ID NO: 610 - DNA, 1014 bp, Homo Sapiens
atgtcgagctcacccgtgaagcgtcagaggatggagtccgcgctggaccagctcaagcagttcaccaccgtggtggccgacacgggcgacttccacgccatcgacgagtacaagccccaggatgctaccaccaacccgtccctgatcctggccgcagcacagatgcccgcttaccaggagctggtggaggaggcgattgcctatggccggaagctgggcgggtcacaagaggaccagattaaaaatgctattgataaactttttgtgttgtttggagcagaaatactaaagaagattccgggccgagtatccacagaagtagacgcaaggctctcctttgataaagatgcgatggtggccagagccaggcggctcatcgagctctacaaggaagctgggatcagcaaggaccgaattcttataaagctgtcatcaacctgggaaggaattcaggctggaaaggagctcgaggagcagcacggcatccactgcaacatgacgttactcttctccttcgcccaggctgtggcctgtgccgaggcgggtgtgaccctcatctccccatttgttgggcgcatccttgattggcatgtggcaaacaccgacaagaaatcctatgagcccctggaagaccctggggtaaagagtgtcactaaaatctacaactactacaagaagtttagctacaaaaccattgtcatgggcgcctccttccgcaacacgggcgagatcaaagcactggccggctgtgacttcctcaccatctcacccaagctcctgggagagctgctgcaggacaacgccaagctggtgcctgtgctctcagccaaggcggcccaagccagtgacctggaaaaaatccacctggatgagaagtctttccgttggttgcacaacgaggaccagatggctgtggagaagctctctgacgggatccgcaagtttgccgctgatgcagtgaagctggagcggatgctgacagaacgaatgttcaatgcagagaatggaaagtag

SEQ ID NO: 611 - DNA, 2049 bp, Homo Sapiens
atgacgaagtctaaggaggcagtgacattcaaggacgtggctgtggtcttctctgaggaggagctgcaactgctggaccttgcccagaggaagctgtaccgagatgtgatgctggagaacttcaggaatgtggtctcagtggggcatcagtccacaccagatggcctaccacagttagagagagaagaaaagctgtggatgatgaagatggcaacccagagagataactcctcaggagccaagaatctaaaagagatggagactcttcaagaagtaggattaaggtacctgcctcatgaagagcttttctgctcccagatctggcaacagattacaagagagttaatcaagtatcaagattctgtggtaaatattcaaagaacaggctgccagttggaaaaacgagatgatttgcactataaagatgagggattcagtaatcagagttcccatcttcaagttcacagagtccacactggtgaaaaaccctacaaaggagaacattgtgtgaaaagtttcagctggagctctcatcttcaaattaaccaaagggctcacgcaggagagaagccctacaaatgtgaaaaatgtgataatgccttccgtcggttttcaagtcttcaagcccatcagagagtccacagtagagcaaaatcatacacaaatgatgcaagttacaggagttttagtcagaggtcacatcttccccatcatcagagagttcccactggagagaatccatacaaatatgaagagtgtgggaggaatgttgggaaaagctcacattgtcaagctcctctgatagttcatacgggagagaaaccctataaatgtgaggagtgtggggtgggcttcagtcagagatcatatcttcaagttcatctgaaagttcacactggaaagaaaccatataagtgtgaagagtgtgggaagagcttcagttggcgttcacgactgcaggctcatgagcgaatccacactggcgagaaaccatacaaatgcaatgcatgtggcaagagctttagttacagctcacaccttaatattcattgtagaatccacacaggagagaaaccctataagtgtgaggagtgtgggaaaggtttcagtgtgggttcacaccttcaggcccatcagataagccacactggagagaagccatacaaatgtgaggagtgtgggaaaggcttctgccgggcctcaaatctgctggaccatcaaagaggccatactggagagaaaccgtatcagtgtgatgcatgtggtaagggcttcagtcgtagctcagattttaacattcattttagagtccatacaggggaaaaaccctataaatgtgaggagtgtggcaagggcttcagccaggcctcaaatcttctggcccatcaaagaggccacactggagagaaaccctacaaatgtggtacatgtgggaagggcttcagtcggagctcagatcttaatgtacactgtagaatccacacaggagagaaaccctataaatgcgagaggtgtggtaaggccttcagtcagttctccagccttcaggtgcatcagagagttcacactggagagaaaccatatcagtgtgcagagtgtgggaagggcttcagtgtaggttcacagcttcaagcccatcagaggtgccacactggagagaaaccctatcaatgtgaggagtgtgggaagggcttctgtcgggcctccaattttctggcacatcgtggagtccacacaggagaaaaaccataccgatgtgatgtgtgtggtaagcgcttcagacagagatcctaccttcaagcccaccagagggtccacacaggagagagaccatacaaatgtgaggaatgtgggaaagtcttcagctggagctcataccttcaagcccatcaaagagttcacaccggagaaaaaccatacaaatgtgaggagtgtgggaagggcttcagttggagctcaagtcttatcattcatcagcgagtccatgctgatgatgagggtgacaaggactttccttcatcagaggattcacacaggaaaactcgataa

SEQ ID NO: 612 - DNA, 1107 bp, Homo Sapiens
atgagcctgtttggaacaacctcaggttttggaaccagtgggaccagcatgtttggcagtgcaactacagacaatcacaatcccatgaaggatattgaagtaacatcatctcctgatgatagcattggttgtctgtcttttagcccaccaaccttgccggggaactttcttattgcaggatcatgggctaatgatgttcgctgctgggaagttcaagacagtggacagaccattccaaaagcccagcagatgcacactgggcctgtgcttgatgtctgctggagtgacgatgggagcaaagtgtttacggcatcgtgtgataaaactgccaaaatgtgggacctcagcagtaaccaagcgatacagatcgcacagcatgatgctcctgttaaaaccatccattggatcaaagctccaaactacagctgtgtgatgactgggagctgggataagactttaaagttttgggatactcgatcgtcaaatcctatgatggttttgcaactccctgaaaggtgttactgtgctgacgtgatataccccatggctgtggtggcaactgcagagaggggcctgattgtctatcagctagagaatcaaccttctgaattcaggaggatagaatctccactgaaacatcagcatcggtgtgtggctatttttaaagacaaacagaacaagcctactggttttgccctgggaagtatcgaggggagagttgctattcactatatcaaccccccgaaccccgccaaagataacttcacctttaaatgtcatcgatctaatggaaccaacacttcagctcctcaggacatttatgcggtaaatggaatcgcgttccatcctgttcatggcacccttgcaactgtgggatctgatggtagattcagcttctgggacaaagatgccagaacaaaactaaaaacttcggaacagttagatcagcccatctcagcttgctgtttcaatcacaatggaaacatatttgcatacgcttccagctacgactggtcaaagggacatgaattttataatccccagaaaaaaaattacattttcctgcgtaatgcagccgaagagctaaagcccaggaataagaagtag

SEQ ID NO: 613 - DNA, 1041 bp, Homo Sapiens
atgaccgcaacccttgccgctgccgctgacatcgctaccatggtctccggcagcagcggcctcgccgccgcccgtctcctgtcgcgcagcttcctcctgccgcagaatggaattcggcattgttcctacacagcttctcggcaacatctctatgttgataaaaatacaaagattatttgccagggtttcactggcaaacagggcacctttcacagccagcaggcattggaatatggcaccaaactcgttggaggaaccactccagggaaaggaggccagacacatctgggcttacctgtctttaatactgtgaaggaggccaaagaacagacaggagcaacggcttctgtcatttatgttcctccgccttttgctgctgctgccattaatgaagctattgaggcagaaattcccttggttgtgtgtatcactgaaggaattccccagcaggacatggtacgagtcaagcacaaactgctgcgccaggaaaagacaaggctaattgggcccaactgccctggagtcatcaatcctggagaatgtaaaattggcatcatgcctggccatattcacaaaaaaggaaggattggcattgtgtccagatctggcaccctgacttatgaagcagttcaccaaacaacgcaagttggattggggcagtctttgtgcgttggcattggaggtgatccttttaatggaacagattttattgactgcctcgaaatctttttgaacgattctgccacagaaggcatcatattgattggtgaaattggtggtaatgcagaagagaatgctgcagaatttttgaagcaacataattcaggtccaaattccaagcctgtagtgtccttcattgctggtttaactgctcctcctgggagaagaatgggtcatgccggggcaattattgctggaggaaaaggtggagctaaagagaagatctctgcccttcagagtgcaggagttgtggtcagtatgtctcctgcacagctgggaaccacgatctacaaggaatttgaaaagaggaagatgctatga

SEQ ID NO: 614 - DNA, 435 bp, Homo Sapiens
atgcctaaagtcaaaagaagccggaaagcacccccagatggctgggagttgattgagccaacactggatgaattagatcaaaagatgagagaagctgaaacagaaccgcatgagggaaagaggaaagtggaatctctgtggcccatcttcaggatccaccaccagaaaacccgctacatcttcgacctcttttacaagcggaaagccatcagcagagaactctatgaatattgtattaaagaaggctatgcagacaaaaacctgattgcaaaatggaaaaagcaaggatatgagaacttgtgctgcctgcggtgcattcagacacgggacaccaacttcgggacgaactgcatctgccgcgtgcccaaaagcaagctggaagtgggccgcatcatcgagtgcacacactgtggctgtcgtggctgctctggctga

SEQ ID NO: 615 - DNA, 2244 bp, Homo Sapiens
atgggtcgctccaattctagatcacattcttcaaggtcaaagtctagatcacagtctagttctcgatcaagatcaagatctcattctagaaagaagcgatacagttctaggtctcgttccagaacatattcaaggtctcgtagtagagatcgtatgtattctagagattatcgtcgcgattacagaaataatagaggaatgagacgaccttatgggtacagaggaaggggtagagggtattatcaaggaggaggaggtagatatcatcgaggtggttatagacctgtctggaatagaaggcactctaggagtcctagacgaggtcgttcacgttccaggagtccaaaaagaagatccgtttcttctcaaagatccagaagcagatctcgccggtcatatagatcttctaggtctccaagatcatcctcttctcgttcttcatccccatatagcaaatctcctgtttctaaaagacgagggtctcaggaaaaacaaaccaaaaaagctgaaggggaaccccaagaagagagtccgttgaaaagtaaatcacaggaggaaccgaaagatacatttgaacatgacccatctgagtctatcgatgaatttaataagtcatcagccacatccggtgatatttggcctggcctttcagcttatgataatagtcctagatcaccccatagtccttcacctattgctacaccacctagtcagagttcatcttgctctgatgctcccatgctcagtacagttcactctgcaaaaaatactccttctcagcattcacattccattcagcatagtcctgaaaggtctgggtctggttctgttggaaatggatctagtcgatacagtccttctcagaatagtccaattcatcacatcccttcacgaagaagtcctgcaaagacaatcgcaccacagaatgctccaagagatgagtctaggggccgttcctcgttttatcctgatggtggagatcaggaaactgcaaagactgggaagttcttaaaaagtccccctctacacaagaatctggatgcacgagaaaagtctaccttcagagaggaaagcccacttaggatcaaaatgatagcgagtgattctcaccgtcctgaagtcaaactcaaaatggcacctgttcctcttgatgattctaacagacctgcttccttgactaaagacaggctgcttgctagtacacttgtccattctgtcaagaaggagcaagaattccgatccatctttgaccacattaagttgccacaggccagcaaaagcacttcagagtcatttattcaacacattgtgtccttggttcatcatgttaaagagcaatacttcaagtcagctgcaatgaccctaaacgagcggttcacttcgtatcagaaagccactgaagaacatagtactcggcaaaagagccctgaaatacacaggagaattgacatctcaccaagtaccctgaggaagcatacccgtttagcaggggaagagagagtttttaaagaagaaaatcaaaagggagataaaaaattaaggtgtgactctgctgaccttcggcatgacattgatcgccgtagaaaagaaagaagtaaagaacggggagattccaagggctccagggaatccagtggatcaagaaagcaggaaaaaactccaaaagattacaaggaatacaaatcttacaaagatgacagtaaacataaaagagagcaagatcattctcgatcttcatcctcttcagcatcaccttcttctcccagttctcgagaagaaaaggagagtaagaaggaaagagaagaagaatttaaaactcaccatgaaatgaaagaatactcaggctttgcaggagttagccgaccacgaggaaccttttttcgaattagaggcagaggaagagccagaggagtttttgctgggacaaatactggtccaaacaactcaaatactacttttcaaaagagaccgaaggaagaggaatgggatccagaatataccccaaagagcaagaagtacttcttgcatgacgacagagatgatggtgtggattattgggccaaaagaggaagaggtcgtggtacttttcaacgtggcagagggcgctttaacttcaaaaaatcaggtagcagtcctaaatggactcatgacaaataccaaggggatgggattgttgaagatgaagaagagaccatggaaaataatgaagaaaagaaggacagacgcaaggaagaaaaggaataa

SEQ ID NO: 616 - DNA, 744 bp, Homo Sapiens
atgcaggtggtgaaggagcaggttatgagagcacttacaaccaagcctagctccctggaccagttcaagagcaaactgcagaacctgagctacactgagatcctgaaaatccgccagtccgagaggatgaaccaggaagatttccagtcccgcccgattttggaactaaaggagaagattcagccagaaatcttagagctgatcaaacagcaacgcctgaaccgccttgtggaagggacctgctttaggaaactcaatgcccggcggaggcaagacaagttttggtattgtcggctttcgccaaatcacaaagtcctgcattacggagacttagaagagagtcctcagggagaagtgccccacgattccttgcaggacaaactgccggtggcagatatcaaagccgtggtgacgggaaaggactgccctcatatgaaagagaaaggtgcccttaaacaaaacaaggaggtgcttgaactcgctttctccatcttgtatgactcaaactgccaactgaacttcatcgctcctgacaagcatgagtactgtatctggacggatggactgaatgcgctactcgggaaggacatgatgagcgacctgacgcggaatgacctggacaccctgctcagcatggaaatcaagctccgcctcctggacctggaaaacatccagatccctgacgcacctccgccgattcccaaggagcccagcaactatgacttcgtctatgactgtaactga

SEQ ID NO: 617 - DNA, 759 bp, Homo Sapiens
atggcgcagctgtgcgggctgaggcggagccgggcgtttctcgccctgctgggatcgctgctcctctctggggtcctggcggccgaccgagaacgcagcatccacgacttctgcctggtgtcgaaggtggtgggcagatgccgggcctccatgcctaggtggtggtacaatgtcactgacggatcctgccagctgtttgtgtatgggggctgtgacggaaacagcaataattacctgaccaaggaggagtgcctcaagaaatgtgccactgtcacagagaatgccacgggtgacctggccaccagcaggaatgcagcggattcctctgtcccaagtgctcccagaaggcaggattctgaagaccactccagcgatatgttcaactatgaagaatactgcaccgccaacgcagtcactgggccttgccgtgcatccttcccacgctggtactttgacgtggagaggaactcctgcaataacttcatctatggaggctgccggggcaataagaacagctaccgctctgaggaggcctgcatgctccgctgcttccgccagcaggagaatcctcccctgccccttggctcaaaggtggtggttctggcggggctgttcgtgatggtgttgatcctcttcctgggagcctccatggtctacctgatccgggtggcacggaggaaccaggagcgtgccctgcgcaccgtctggagctccggagatgacaaggagcagctggtgaagaacacatatgtcctgtga

SEQ ID NO: 618 - DNA, 1624 bp, Homo Sapiens
ctcctccaagccgaagctcaagaagcgcttttccctgcgttcagtgggtcgctctgtccgaggctcagtccgtggcatcctgcagtggcgggggaccgttgaccctccctcctccgctgggcccctggagacctcgtcaggccccccagtcttaggtggaaacagcaactccaactcctctggcggggctgggaccgttggtaggggactggtcagtgatggaacgtcccctggggaaagatggactcaccgttttgagaggctgagactcagtcggggagggggcgccttgaaggatggagcagggatggtgcagagggaagagctgctgagtttcatgggggctgaggaggcagcccctgacccagccggagtgggccggggaggaggggtggctgggcctccttcagggggaggagggcagcctcagtggcagaagtgtcgcctgctgcttcgaagtgaaggagaaggaggaggaggaagtcgcctggagttctttgtaccacccaaggcctctcggccccgactcagcatcccctgctcttctatcacagacgtccggacaaccacagccctggagatgcctgaccgggagaacacgtttgtggttaaggtggaaggtccatccgagtatatcatggagacagtggatgcccagcatgtgaaggcctgggtgtctgacatccaagaatgcctgagcccaggaccctgccctgctaccagtccccgccccatgaccctccctctggcccctgggacctcattccttacaagggagaacacagacagcctggagctgtcctgcctgaatcactcggagagtctacccagccaggacctgctgcttggacccagcgagagcaatgaccgcctgtcgcagggggcatatgggggcctctcagaccgcccctcggcatccatctcccccagctctgcctccattgccgcctcccattttgactcgatggaactgcttcccccagagttgcccccccgcatccccattgaagagggacccccaacagggacagttcatcccctctcagccccctaccctcccttggacactccggaaacagccacagggtccttcctgttccagggggagccagagggcggtgagggggaccagcccctctcagggtatccttggttccacgggatgctctctcggctcaaggctgcacagttggtgctgactggcggcactggctcccacggtgtcttcctggtgcgccagagtgagacaaggcggggtgaatacgtcctcaccttcaacttccagggcaaggccaagcacctgcgtttgtcgctgaacgaggagggtcagtgccgggtccagcacctgtggttccagtccattttcgatatgctcgagcacttccgggtgcaccccatccctttggagtcgggaggctccagtgatgttgtccttgtcagctatgtcccatcctcccagcgacagcagggtgagcagagcaggtctgcaggggaggaggtgcccgtgcacccaagaagtgaggccgggagcaggctgggagccatgcgggggtgtgcgagggagatggatgccaccccgatgcctcctgcaccctcatgcccttcggagcgagtgactgtgtaa

SEQ ID NO: 619 - DNA, 684 bp, Homo Sapiens
atgcagaagctcctcctggaggctggtggaacagggccggttcggagcgaccttggccgttggcctgaccatctttgtgctgtctgtcgtcactatcatcatctgcttcacctgctcctgctgctgcctttacaagacgtgccgccgaccacgtccggttgtcaccaccaccacatccaccactgtggtgcatgccccttatcctcagcctccaagtgtgccgcccagctaccctggaccaagctaccagggctaccacaccatgccgcctcagccagggatgccagcagcaccctacccaatgcagtacccaccaccttacccagcccagcccatgggcccaccggcctaccacgagaccctggctggaggagcagccgcgccctaccccgccagccagcctccttacaacccggcctacatggatgccccgaaggcggccctctgagcattccctggcctctctggctgccacttggttatgttgtgtgtgtgcgtgagtggtgtgcaggcgcggttccttacgccccatgtgtgctgtgtgtgtccaggcacggttccttacgccccatgtgtgctgtgtgtgtcctgcctgtatatgtggcttcctctgatgctgacaaggtggggaacaatccttgccagagtgggctgggaccagactttgttctcttcctcacctga

SEQ ID NO: 620 - DNA, 8400 bp, Homo Sapiens
atgacgtccatccatttcgtggttcacccgctgccgggcaccgaggaccagctcaatgacaggttacgagaagtttctgagaagctgaacaaatataatttaaacagccacccccctttgaatgtattggaacaggctactattaaacagtgtgtggtgggaccaaatcatgctgcctttcttcttgaggatggtagagtttgcaggattggtttttcagtacagccagacagattggaattgggtaaacctgataataatgatgggtcaaagttgaacagcaactcgggggcagggaggacgtcaaggcctggtaggacaagcgactctccatggtttctctcaggttctgagactctaggcaggctggcaggcaacaccttaggaagccgctggagttctggagtgggtggaagtggtggaggatcctctggtaggtcatcagctggagctcgagattcccgccggcagactcgagttattcggacaggacgggatcgagggtctgggcttttgggcagtcagccccagccagttattccagcatctgtcattccagaggagctgatttcacaggcccaagttgttttacaaggcaaatccagaagtgtcattattcgagaacttcagagaacaaatcttgatgtgaaccttgctgtaaataatttacttagccgggatgatgaagatggagatgatggggatgatacagccagcgaatcttatttgcctggagaggatcttatgtctctccttgatgccgacattcattctgcccacccaagtgtcattattgatgcagatgccatgttttctgaagacattagctattttggttacccttcttttcgtcgttcatcactttccaggctaggctcatctcgagttctccttcttcccttagagagagactctgagctgttgcgtgaacgtgaatccgttttacgtttacgtgaacgaaggtggcttgatggagcctcatttgataatgaaaggggttctaccagcaaggaaggagagccaaacttggataagaagaatacacctgttcaaagtccagtatctctaggagaagatttgcagtggtggcctgataaggatggaacaaaattcatctgtattggggctctgtattctgaacttctggctgtcagcagtaaaggagaactttatcagtggaaatggagtgaatctgagccttacagaaatgcccagaatccttcattacatcatccacgagcaacatttttggggttaaccaatgaaaagatagtcctcctgtctgcaaatagcataagagcaactgtagctacagaaaataacaaggttgctacatgggtggatgaaactttaagttctgtggcttctaaattagagcacactgctcagacttactctgaacttcaaggagagcggatagtttctttacattgctgtgccctttacacctgcgctcagctggaaaacagtttatattggtggggtgtagttccttttagtcaaaggaagaaaatgttagagaaagctagagcaaaaaataaaaagcctaaatccagtgctggtatttcttcaatgccgaacatcactgttggtacccaggtatgcttgagaaataatcctctttatcatgctggagcagttgcattttcaattagtgctgggattcctaaagttggtgtcttaatggagtcagtttggaatatgaatgacagctgtagatttcaacttagatctcctgaaagcttgaaaaacatggaaaaagctagcaaaactactgaagctaagcctgaaagtaagcaggagccagtgaaaacagaaatgggtcctccaccatctccagcatccacgtgtagtgatgcatcctcaattgccagcagtgcatcaatgccatacaaacgacgacggtcaacccctgcaccaaaagaagaggaaaaggtgaatgaagagcagtggtctcttcgggaagtggtttttgtggaagatgtcaagaatgttcctgttggcaaggtgctaaaagtagatggtgcctatgttgctgtaaaatttccaggaacctccagtaatactaactgtcagaacagctctggtccagatgctgacccttcttctctcctgcaggattgtaggttacttagaattgatgaattgcaggttgtcaaaactggtggaacaccgaaggttcccgactgtttccaaaggactcctaaaaagctttgtatacctgaaaaaacagaaatattagcagtgaatgtagattccaaaggtgttcatgctgttctgaagactggaaattgggtacgatactgtatctttgatcttgctacaggaaaagcagaacaggaaaataattttcctacaagcagcattgctttccttggtcagaatgagaggaatgtagccattttcactgctggacaggaatctcccattattcttcgagatggaaatggtaccatctacccaatggccaaagattgcatgggaggaataagggatcccgattggctggatcttccacctattagtagtcttggaatgggtgtgcattctttaataaatcttcctgccaattcaacaatcaaaaagaaagctgctgttatcatcatggctgtagagaaacaaaccttaatgcaacacattctgcgctgtgactatgaggcctgtcgacaatatctaatgaatcttgagcaagcggttgttttagagcagaatctacagatgctgcagacattcatcagccacagatgtgatggaaatcgaaatattttgcatgcttgtgtatcagtttgctttccaaccagcaataaagaaactaaagaagaagaggaagcggagcgttctgaaagaaatacatttgcagaaaggctttctgctgttgaggccattgcaaatgcaatatcagttgtttcaagtaatggcccaggtaatcgggctggatcatcaagtagccgaagtttgagattacgggaaatgatgagacgttcgttgagagcagctggtttgggtagacatgaagctggagcttcatccagtgaccaccaggatccagtttcaccccccatagctccccctagttgggttcctgaccctcctgcgatggatcctgatggtgacattgattttatcctggcccccgctgtgggatctcttaccacagcagcaaccggtactggtcaaggaccaagcacctccactattccaggtccttccacagagccatctgtagtagaatccaaggatcgaaaggcgaatgctcattttatattgaaattgttatgtgacagtgtggttctccagccctatctacgagaacttctttctgccaaggatgcaagagggatgaccccatttatgtcagctgtaagtggccgagcttatcctgctgcaattaccatcttagaaactgctcagaaaattgcaaaagctgaaatatcctcaagtgaaaaagaggaagatgtattcatgggaatggtttgcccatcaggtaccaaccctgatgactctcctttatatgttttatgttgtaatgacacttgcagttttacatggactggagcagagcacattaaccaggatatttttgagtgtcgaacttgtggcttgctggagtcactgtgttgttgtacggaatgtgcaagggtttgtcataaaggtcatgattgcaaactcaaacggacatcaccaacagcctactgtgattgttgggagaaatgtaaatgtaaaactcttattgctggacagaaatctgctcgtcttgatctactttatcgcctgctcactgctactaatctggttactctgccaaacagcaggggagagcacctcttactattcttagtacagacagtcgcaaggcagacggtggagcattgtcaatacaggccacctcgaatcagggaagatcgtaaccgaaaaacagccagtcctgaagattcagatatgccagatcatgatttagagcctccaagatttgcccagcttgcattggagcgtgttctacaggactggaatgccttgaaatctatgattatgtttgggtcgcaggagaataaagaccctcttagtgccagcagtagaataggccatcttttgccagaagagcaagtatacctcaatcagcaaagtggcacaattcggctggactgtttcactcattgccttatagttaagtgtacagcagatattttgcttttagatactctactaggtacactagtgaaagaactccaaaacaaatatacacctggacgtagagaagaagctattgctgtgacaatgaggtttctacgttcagtggcaagagtttttgttattctgagtgtggaaatggcttcatccaaaaagaaaaacaactttattccacagccaattggaaaatgcaagcgtgtattccaagcattgctaccttacgctgtggaagaattgtgcaacgtagcagagtcactgattgttcctgtcagaatggggattgctcgtccaactgcaccatttaccctggctagtactagcatagatgccatgcagggcagtgaagaattattttcagtggaaccactaccaccacgaccatcatctgatcagtctagcagctccagtcagtctcagtcatcctacatcatcaggaatccacagcagaggcgcatcagccagtcacagcccgttcggggcagagatgaagaacaggatgatattgtttcagcagatgtggaagaggttgaggtggtggagggtgtggctggagaagaggatcatcatgatgaacaggaagaacacggggaagaaaatgctgaggcagagggacaacatgatgagcatgatgaagacgggagtgatatggagctggacttgttagcagcagctgaaacagaaagtgatagtgaaagtaaccacagcaaccaagataatgctagtgggcgcagaagcgttgtcactgcagcaactgctggttcagaagcaggagcaagcagtgttcctgccttcttttctgaagatgattctcaatcgaatgactcaagtgattctgatagcagtagtagtcagagtgacgacatagaacaggagacctttatgcttgatgagccattagaaagaaccacaaatagctcccatgccaatggtgctgcccaagctccccgttcaatgcagtgggctgtccgcaacacccagcatcagcgagcagccagtacagccccttccagtacatctacaccagcagcaagttcagcgggtttgatttatattgatccttcaaacttacgccggagtggtaccatcagtacaagtgctgcagctgcagcagctgctttggaagctagcaacgccagcagttacctaacatctgcaagcagtttagccagggcttacagcattgtcattagacaaatctcggacttgatgggccttattcctaagtataatcacctagtatactctcagattccagcagctgtgaaattgacttaccaagatgcagtaaacttacagaactatgtagaagaaaagcttattcccacttggaactggatggtcagtattatggattctactgaagctcaattacgttatggttctgcattagcatctgctggtgatcctggacatccaaatcatcctcttcacgcttctcagaattcagcgagaagagagaggatgactgcgcgagaagaagctagcttacgaacacttgaaggcagacgacgtgccaccttgcttagcgcccgtcaaggaatgatgtctgcacgaggagacttcctaaattatgctctgtctctaatgcggtctcataatgatgagcattctgatgttcttccagttttggatgtttgctcattgaagcatgtggcatatgtttttcaagcacttatatactggattaaggcaatgaatcagcagacaacattggatacacctcaactagaacgcaaaaggacgcgagaactcttggaactgggtattgataatgaagattcagaacatgaaaatgatgatgacaccaatcaaagtgctactttgaatgataaggatgatgactctcttcctgcagaaactggccaaaaccatccatttttccgacgttcagactccatgacattccttgggtgtatacccccaaatccatttgaagtgcctctggctgaagccatccccttggctgatcagccacatctgttgcagccaaatgctagaaaggaggatctttttggccgtccaagtcagggtctttattcttcatctgccagtagtgggaaatgtttaatggaggttacagtggatagaaactgcctagaggttcttccaacaaaaatgtcttatgctgccaatctgaaaaatgtaatgaacatgcaaaaccggcaaaaaaaagaaggggaagaacagcccgtgctgccagaagaaactgagagttcaaaaccagggccatctgctcatgatcttgctgcacaattaaaaagtagcttactagcagaaataggacttactgaaagtgaagggccacctctcacatctttcaggccacagtgtagctttatgggaatggttatttcccatgatatgctgctaggacgttggcgcctttctttagaactgttcggcagggtattcatggaagatgttggagcagaacctggatcaatcctaactgaattgggtggttttgaggtaaaagaatcaaaattccgcagagaaatggaaaaactgagaaaccagcagtcaagagatttgtcactagaggttgatcgggatcgagatcttctcattcagcagactatgaggcagcttaacaatcactttggtcgaagatgtgctactacaccaatggctgtacacagagtaaaagtcacatttaaggatgagccaggagagggcagtggtgtagcacgaagtttttatacagccattgcacaagcatttttatcaaatgaaaaattgccaaatctagagtgtatccaaaatgccaacaaaggcacccacacaagtttaatgcagagattaaggaaccgaggagagagagaccgggaaagggagagagaaagggaaatgaggaggagtagtggtttgcgagcaggttctcggagggaccgggatagagactttagaagacagctttccatcgacactaggccctttagaccagcctctgaagggaatcctagcgatgatcctgagcctttgccagcacatcggcaggcacttggagagaggctttatcctcgtgtacaagcaatgcaaccagcatttgcaagtaaaatcactggcatgttgttggaattatccccagctcagctgcttctccttctagcaagtgaggattctctgagagcaagagtggatgaggccatggaactcattattgcacatggacgggaaaatggagctgatagtatcctggatcttggattagtagactcctcagaaaaggtacagcaggaaaaccgaaagcgccatggctctagtcgaagtgtagtagatatggatttagatgatacagatgatggtgatgacaatgcccctttgttttaccaacctgggaaaagaggattttatactccaaggcctggcaagaacacagaagcaaggttgaattgtttcagaaacattggcaggattcttggactatgtctgttacagaatgaactatgtcctatcacattgaatagacatgtaattaaagtattgcttggtagaaaagtcaattggcatgattttgctttttttgatcctgtaatgtatgagagtttgcggcaactaatcctcgcgtctcagagttcagatgctgatgctgttttctcagcaatggatttggcatttgcaattgacctgtgtaaagaagaaggtggaggacaggttgaactcattcctaatggtgtaaatataccagtcactccacagaatgtatatgagtatgtgcggaaatacgcagaacacagaatgttggtagttgcagaacagcccttacatgcaatgaggaaaggtctactagatgtgcttccaaaaaattcattagaagatttaacggcagaagattttaggcttttggtaaatggctgcggtgaagtcaatgtgcaaatgctgatcagttttacctctttcaatgatgaatcaggagaaaatgctgagaagcttctgcagttcaagcgttggttctggtcaatagtagagaagatgagcatgacagaacgacaagatcttgtttacttttggacatcaagcccatcactgccagccagtgaagaaggattccagcctatgccctcaatcacaataagaccaccagatgaccaacatcttcctactgcaaatacttgcatttctcgactttacgtcccactctattcctctaaacagattctcaaacagaaattgttactcgccattaagaccaagaattttggttttgtgtag

SEQ ID NO: 621 - DNA, 1260 bp, Homo Sapiens
atgccaggcagaggccgctgcccggactgcggctccacggagctggtggaagactcgcactattcgcagagccagctggtgtgctccgactgcggctgcgtggtcaccgagggggtccttaccactaccttcagcgacgagggcaatctccgagaggtaacatattcccgaagcacaggggaaaacgaacaagttagtcgcagccagcaacgaggtctccggcgagtgagagacctttgtcgagttctgcagttgccaccaacatttgaggataccgcggttgcctactaccaacaggcatatcggcactctggcatccgagcggccaggctgcaaaagaaggaggtgttggttgggtgctgcgtcttaatcacctgccgacagcataactggcccctaacaatgggggccatctgcacgctgttgtatgcagatttggatgtgttttctagcacttacatgcagatagtgaagctcctgggactggatgtgccatctctgtgcttggcagaactggtgaagacctattgcagcagcttcaaactgttccaagcttcaccttctgtgccagccaaatacgtggaagacaaagagaagatgctgtctcgaacaatgcagttggtggagctggcaaatgagacgtggctggtgaccgggaggcatcccttgcccgtcatcactgctgcgactttcctggcttggcagtcgctgcagcctgcagatcggctttcatgttcccttgcccgattttgtaaattggcaaatgtggacctgccctacccggcgtcctcccgcctgcaggagctgctggctgtgctgctgcggatggctgagcagctggcctggttacgagttctgagacttgacaaacggtctgtggtgaagcacatcggtgaccttctccagcaccgccagtcactggtccgctctgcctttcgggatgggacagcagaagtggagacccgagagaaggagccaccggggtggggacaggggcaaggagaaggggaggtgggaaataattccttaggtttaccccaggggaagcggccggccagtcctgcccttctcttgccaccctgcatgttgaagtccccgaagcggatctgccctgtaccccctgtctccactgtcactggagatgagaacatttctgatagtgaaatagaacagtatttgcgtacccctcaggaagttagggactttcagagagcccaggctgctagacaggctgccacgagtgtccctaaccctccctga

SEQ ID NO: 622 - DNA, 1035 bp, Homo Sapiens
atgaacctcctgccgtgtaaccctcacggcaacgggctgctctacgccggcttcaaccaggaccacggatgctttgcgtgtgggatggaaaatggattccgagtctataacactgatccactaaaagaaaaagagaaacaagaatttctagaaggaggagttggccatgttgaaatgttatttcgctgcaactatttagctttagttggtggtggaaaaaagccgaaataccctcccaacaaagtaatgatctgggatgacctgaagaagaagactgttattgaaatagaattttctacagaagtcaaggcagtcaagctgcggcgagatagaattgtggtggttttggactccatgattaaggtgttcacattcacacacaatccccatcagttgcacgtcttcgaaacctgctataaccccaaaggcctctgtgtcctttgtcccaatagtaacaactccctcctggcctttccgggcacgcacacgggccatgtgcagcttgtggacctggccagcacggagaagccacccgtggacattcctgcacacgagggtgtcctgagctgcattgcactcaacctgcagggaacaagaattgcaactgcatccgagaaagggacgcttataagaatatttgatacttcatcagggcatttaatccaggaactgcgaagaggatctcaagcagccaatatttactgcatcaacttcaatcaggatgcgtccctcatctgcgtatccagcgaccacggcacagtgcatatttttgcagctgaagatccaaaaaggaataaacagtccagtttggcctcagccagtttccttccaaaatacttcagttccaagtggagtttctccaagtttcaggttccctcaggctctccgtgcatttgtgcctttggaacagagccaaacgccgtcattgcaatttgtgcagacggcagctactacaaattcctgttcaaccccaagggggagtgcatccgagatgtctacgcgcagtttctagagatgaccgatgacaagctgtga

SEQ ID NO: 623 - DNA, 1113 bp, Homo Sapiens
atgctcccgcggaggctgctggccgcctggctggcggggacgcggggcgggggcctgctggcgcttctggccaatcagtgccgcttcgtcacgggcctgcgcgtgcggcgcgcgcagcagatcgcgcagctctacggccgcctctactccgagagctcacgccgcgttctcctcggccgcctctggcgccggctgcacggccgtcctggccatgcctctgccttgatggcggcgttagccggcgtcttcgtttgggacgaggagaggatccaggaggaggagttgcagagatctattaatgagatgaagcggttggaagaaatgtcaaatatgtttcagagctctggagtccagcaccaccctccagaaccaaaagcccaaacagaagggaatgaagattcagagggcaaagagcaacgttgggaaatggtgatggataagaaacactttaagctgtggcggcgcccaattacaggcacccacctttaccagtaccgagtttttggaacctacacagatgtgacacctcggcagttcttcaatgttcagctggacacagagtatagaaaaaaatgggatgccctggtaatcaagctggaggtgattgagagggatgtggttagtggttccgaggttcttcactgggtaacccattttccttatccaatgtactcacgggattatgtttatgttcggcggtatagtgtggatcaggaaaacaacatgatggtgttggtgtcgcgtgctgtggagcatccgagtgtgccagagtctccagaattcgtcagggtcagatcatatgaatcccaaatggttatccgtccccacaagtcatttgatgagaatggctttgactacttactaacatacagtgacaatccccaaacggtgtttcctcgctactgtgttagttggatggtttccagtggcatgccagatttcctggagaagctgcacatggccactctgaaagccaagaatatggagattaaagtaaaggactacatctcagctaagcctctggaaatgagtagtgaagccaaggccaccagccagtcctctgagcgaaagaacgagggcagctgtggccctgctcggattgagtatgcttga

SEQ ID NO: 624 - DNA, 1029 bp, Homo Sapiens
atgcggaaggaaaccccaccccccctagtgcccccggcggcccgggagtggaatcttcccccaaatgcgcccgcctgcatggaacggcagttggaggctgcgcggtaccggtccgatggggcgcttctcctcggggcctccagcctgagtgggcgctgctgggccggctccctctggctttttaaggacccctgtgccgcccccaacgaaggcttctgctccgccggagtccaaacggaggctggagtggctgacctcacttgggttggggagagaggtattctagtggcctccgattcaggtgctgttgaattgtgggaactagatgagaatgagacacttattgtcagcaagttctgcaagtatgagcatgatgacattgtgtctacagtcagtgtcttgagctctggcacacaagctgtcagtggtagcaaagacatctgcatcaaggtttgggaccttgctcagcaggtggtactgagttcataccgagctcatgctgctcaggtcacttgtgttgctgcctctcctcacaaggactctgtgtttctttcatgcagcgaggacaatagaattttactctgggatacccgctgtcccaagccagcatcacagattggctgcagtgcgcctggctaccttcctacctcgctggcttggcatcctcagcaaagtgaagtctttgtctttggtgatgagaatgggacagtctcccttgtggacaccaagagtacaagctgtgtcctgagctcagctgtacactcccagtgtgtcactgggctggtgttctccccacacagtgttcccttcctggcctctctcagtgaagactgctcacttgctgtgctggactcaagcctttctgagttgtttagaagccaagcccacagagactttgtgagagatgcgacttggtccccgctcaatcactccctgcttaccacagtgggctgggaccatcaggtcgtccaccacgttgtgcccacagaacctctcccagcccctggacctgcaagtgttactgagtag

SEQ ID NO: 625 - DNA, 1947 bp, Homo Sapiens
atgtcgtggctcttcggcgttaacaagggccccaagggtgaaggcgcggggccgccgccgcctttgccgcccgcgcagcccggggccgagggcggcggggaccgcggtttgggagaccggccggcgcccaaggacaaatggagcaacttcgaccccaccggcctggagcgcgccgccaaggcggcgcgcgagctggagcactcgcgttacgccaaggaggccctgaatctggcgcagatgcaggagcagacgctgcagttggagcaacagtccaagctcaaagagtatgaggccgccgtggagcagctcaagagcgagcagatccgggcgcaggctgaggagaggaggaagaccctgagcgaggagacccggcagcaccaggccagggcccagtatcaagacaagctggcccggcagcgctacgaggaccaactgaagcagcagcaacttctcaatgaggagaatttacggaagcaggaggagtccgtgcagaagcaggaagccatgcggcgagccaccgtggagcgggagatggagctgcggcacaagaatgagatgctgcgagtggagaccgaggcccgggcgcgcgccaaggccgagcgggagaatgcagacatcatccgcgagcagatccgcctgaaggcgtccgagcaccgtcagaccgtcttggagtccatcaggacggctggcaccttgtttggggaaggattccgtgcctttgtgacagaccgggacaaagtgacagccacggtggctgggctgacgctgctggctgtcggggtctactcagccaagaatgcgacagccgtcactggccgcttcatcgaggctcggctggggaagccgtccctagtgagggagacgtcccgcatcacggtgctggaggcgctgcggcaccccatccaggtcagccggcggctcctcagtcgaccccaggacgtgctggagggtgttgtgcttagtcccagcctggaagcacgggtgcgcgacatcgccatagcaaccaggaacaccaagaagaaccggggcctgtacaggcacatcctgctgtatgggccaccaggcaccgggaagacgctgtttgccaagaaactcgccctgcactcaggcatggactacgccatcatgacaggcggggacgtggcccccatggggcgggaaggcgtgaccgccatgcacaagctctttgactgggccaataccagccggcgcggcctcctgctcttcatggatgaagcagacgccttccttcggaagcgagccactgaggagataagcaaggacctcagagccacactgaacgccttcctgtaccacatgggccaacacagcaacaaattcatgctggtcctggccagcaatctgcctgagcagttcgactgtgccatcaacagccgcattgacgtgatggtccacttcgacctgccgcagcaggaggagcgggagcgcctggtgagactgcattttgacaactgtgttcttaagccggccacagaaggaaaacggcgcctgaagctggcccagtttgactacgggaggaagtgctcggaggtcgctcggctgacggagggcatgtcgggccgggagatcgctcagctggccgtgtcctggcaggccacggcatatgcctccaaggacggggtcctcactgaggccatgatggacgcctgtgtgcaagatgctgtccagcagtaccgacagaagatgcgctggctgaaggcggaggggcctgggcgcggggtcgagcaccccctatccggagtccaaggcgagaccctcacctcatggagcctggccacggacccctcctacccctgccttgccggcccctgcacatttaggatatgctcctggatggggactgggctgtgcccagggcctctgtcccccaggatgtcttgtggtggcggtcggccgttctgccccccagggcaccccctgttgtag

SEQ ID NO: 626 - DNA, 1032 bp, Homo Sapiens
atgcagcccccgcccccgggcccgctgggcgactgcctgcgggactgggaggatctacagcaggacttccagaacatccaggagacccatcggctctaccgcctgaagctggaggagctgaccaaacttcagaacaattgcaccagctccatcacgcggcagaagaagcggctccaggagctggccctcgccctgaagaaatgcaaaccctccctcccagcagaggccgagggggccgcacaggagctggagaaccagatgaaagagcgccaaggcctcttctttgacatggaggcctatttgcctaagaagaatggattgtacctgagcctggttctggggaacgtcaacgtcacgctcctgagcaagcaggctaagtttgcctacaaggacgagtatgagaagttcaagctctacctcaccatcatcctcatcctcatctccttcacttgccgcttcctgctcaactccagggtgacagatgctgccttcaacttcctgctggtctggtactactgcaccctgaccatccgggagagcatcctcatcaacaacggctcccggatcaaaggctggtgggtgttccatcactacgtgtccaccttcctgtcgggagtcatgctgacgtggcccgacggtctcatgtaccagaaattccggaaccaattcctctccttttccatgtaccagagcttcgtgcagtttctccagtactactaccagagcggctgcctctaccgcctgcgggcgctgggcgagcggcacaccatggacctcactgtggagggcttccagtcctggatgtggcggggcctcaccttcctgctgccttttcttttctttggacacttctggcagctttttaacgcgctgacgttgttcaacctggcccaggaccctcagtgcaaggagtggcaggtgcttatgtgcggctttcccttcctcctccttttcctcggcaatttcttcaccaccctgagggttgtgcaccacaagtttcacagtcagcggcacgggagcaagaaggattga

SEQ ID NO: 627 - DNA, 1773 bp, Homo Sapiens
atgtcaggagactacgaggatgacctctgccggcgggcactcatcctggtctcggacctctgtgcgcgggtccgagatgctgacaccaacgacaggtgccaggagttcaatgaccgaatccgaggctatccccggggtccagatgcagacatctccgtgagcctgctgtcggtcatcgtgacattctgtggcattgtccttctgggtgtctctctcttcgtgtcctggaagttgtgctgggtgccctggcgggacaagggaggctcggcagtgggcggtggccccctgcgcaaagacctaggccctggtgtcgggctggcaggcctggtaggcggaggcgggcaccacctggcggctggcctgggtggccatcctctgctgggcggcccacaccaccatgcccatgccgcccaccatccaccctttgctgagctgctggagccaggcagcctggggggttctgacacccctgagccctcctacttggacatggactcgtatccagaggctgcagcagcagcagtggccgctggggtcaaaccgagccaaacatcccctgagctgccctctgaggggggagcaggctctgggttgctcctgctgccccccagtggtgggggcttgcccagtgcccagtcacatcagcaggtcacaagcctggcacccactaccaggtacccagccctgccccgacccctcacccagcagactctgacctcccagccggaccccagcagtgaggagcggccacctgccctgcccttacccctgcctggaggcgaggaaaaagccaaactcattgggcagattaagccagagctgtaccaggggactggccctggtggccggcggagcggtgggggcccaggctctggagaggcaggcacaggggcaccctgtggccgtatcagcttcgccctgcggtacctctatggctcggaccagctggtggtgaggatcctgcaggccctggacctccctgccaaggactccaacggcttctcagacccctacgtcaagatctacctgctgcctgaccgcaagaaaaagtttcagaccaaggtgcacaggaagaccctgaaccccgtcttcaatgagacgtttcaattctcggtgcccctggccgagctggcccaacgcaaactgcacttcagcgtctatgactttgaccgcttctcgcggcacgacctcatcggccaggtggtgctggacaacctcctggagctggccgagcagccccctgaccgcccgctctggagggacatcgtggagggcggctcggaaaaagcagatcttggggagctcaacttctcactctgctacctccccacggccgggcgcctcaccgtgaccatcatcaaagcctctaacctcaaagcgatggacctcactggcttctcagacccctacgtgaaggcctccctgatcagcgaggggcggcgtctgaagaagcggaaaacctccatcaagaagaacacgctgaaccccacctataatgaggcgctggtgttcgacgtggcccccgagagcgtggagaacgtggggctcagcatcgccgtggtagactacgactgcatcgggcacaacgaggtgatcggcgtgtgccgtgtgggccccgacgctgccgacccgcacggccgcgagcactgggcagagatgctggccaatccccgcaagcccgtggagcactggcatcagctagtggaggaaaagactgtgaccagcttcacaaaaggcagcaaaggactatcagagaaagagaactccgagtga

SEQ ID NO: 628 - DNA, 4011 bp, Homo Sapiens
atggcgggtccgcaaatggggggatctgcagaggatcaccccccacgaaaaagacatgcagcagaaaagcaaaaaaagaaaacagttatatatacaaaatgctttgaatttgagtcggccacacagcgcccgattgaccgccagcgatacgacgagaacgaggacttgtcggacgtggaggagatcgtcagcgtccgcggcttcagcctggaggagaagcttcgcagccagctgtaccagggggacttcgtgcacgccatggagggcaaagatttcaactatgagtacgtacagagagaagctctcagggttcccctgatatttcgagaaaaggatggactgggaattaagatgcctgaccctgatttcacagtccgagacgtcaaactcctagtggggagccggcggcttgtggacgtgatggatgtgaacacccagaagggcacggagatgagcatgtcccagtttgtgcgttactacgagacgcccgaggcccagcgggacaagctgtacaacgtcatcagcctagagttcagccacaccaagctggagcacttggtcaagcgtccgactgtggtagacctggtggactgggtggacaacatgtggccccagcatctgaaggagaagcagacagaagccacgaacgccattgcagagatgaagtacccgaaagtgaaaaagtactgtctgatgagcgtgaaaggttgtttcaccgacttccacatcgactttggaggcacttccgtttggtaccatgttttccggggtgggaagattttttggctgattcctccaacgctgcacaatttggcgctgtacgaggagtgggtgctgtcaggcaaacagagtgacatctttctgggagaccgtgtggaacgatgccaaagaattgagctgaagcagggctacacatttttcatcccttccggttggatccatgccgtctacacccctgtagactctttggtgttcggcggaaacatcctgcacagctttaacgtgcccatgcagctgcggatctacgagatcgaggacaggacgcgggtgcagcccaaattccgttaccccttctactatgagatgtgctggtatgtcctggagagatacgtgtactgtgtgacccagcgctcccacctcactcaggaataccagagggagtcgatgcttattgatgccccgaggaagcccagcatagacggcttctcttcggattcctggctggagatggaggaggaggcctgtgatcagcagcctcaggaggaggaggagaaggacgaggagggcgagggcagggacagggcacccaaaccgcccaccgatggctccacttcacccaccagcacgccctctgaggaccaggaggccctcgggaagaagcccaaagcacctgccctgcgattcctcaaaaggactttgtctaatgagtcggaggaaagtgtgaagtccaccacattggccgtagactaccccaagacccccaccggctctcccgccacggaggtctctgccaaatggacccatctcactgagtttgaactgaagggcctgaaagctctggtggagaaactggaatccctcccggagaacaagaagtgtgtccccgagggcatcgaggacccccaggcactcctggagggtgtgaagaacgtcctgaaggagcacgcagatgatgaccctagtctggccatcactggggtccctgtggtgacttggccaaagaagactccaaagaaccgggctgtgggtcggcccaaggggaagctgggcccggcctccgcggtgaagttggccgccaaccggacaacggcaggagctcggcggcgccggacgcgatgccgcaagtgcgaggcctgcctgcggaccgagtgcggagagtgccacttctgcaaggacatgaagaagttcgggggccccgggcgcatgaagcagagctgcatcatgcggcagtgcatcgcgccagtgctgccccacaccgccgtgtgccttgtgtgtggcgaggcggggaaggaagacacggtggaagaggaggaaggcaagtttaacctcatgctcatggagtgctccatctgcaatgaaatcatccaccctggatgccttaagattaaggagtcagagggtgtggtcaacgacgagcttccaaactgctgggagtgtccgaagtgtaaccacgccggcaagaccgggaaacaaaagcgtggccctggctttaagtacgcctccaacctgcccggctccctgctcaaggagcagaagatgaaccgggacaacaaggaagggcaggaacctgccaagcggaggagtgagtgtgaggaggcgccccggcgcaggtcggatgagcactcgaagaaggtgccgccggacggccttctgcgcagaaagtctgacgacgtgcacctgaggaagaagcggaaatacgagaagccccaggagctgagtggacgcaagcgggcctcatcgcttcaaacgtcccccggttcctcctctcacctctcgccgaggccccctctaggcagcagcctcagcccctggtggagatccagtctcacttacttccagcagcagctcaaacctggcaaagaagataagcttttcaggaaaaagcggcggtcctggaagaacgccgaggaccgcatggcgctggccaacaagcccctccggcgcttcaagcaggaacccgaggacgaactgcccgaggcgccccccaagaccagggagagcgaccactcccgctccagctcccccaccgcgggacccagcaccgaaggggccgagggcccggaggagaagaagaaggtgaagatgcgccggaagcggcggcttcccaacaaggagctgagcagggagctgagcaaggagctcaaccacgagatccagaggacggagaacagcctggccaacgagaaccagcagcccatcaagtcggagcctgagagcgagggcgaggagcccaagcggcccccgggcatctgcgagcgtccccaccgcttcagcaaggggctcaacggcaccccccgggagctgcggcaccagctggggcccagcctgcgcagcccgccccgtgtcatctcccggcccccaccctccgtgtccccgcccaagtgtatccagatggagcgccatgtgatccggccaccccccatcagccccccgcctgactcgctacccctggacgatggggcagcccacgtcatgcacagggaggtgtggatggccgtcttcagctacctcagccaccaagacctgtgtgtgtgcatgcgggtctgcaggacctggaaccgctggtgctgcgataagcggttgtggacccgcattgacctgaaccactgcaagtctatcacacccctgatgctgagtggcatcatccggcgacagcccgtctccctcgacctcagctggaccaatatctccaagaagcagctgagctggctcatcaaccggctgcctgggctccgggacttggtgctgtcaggctgctcatggatcgcggtctcggccctttgcagctccagttgtccgctgctccggaccctggatgtccagtgggtggagggactaaaggatgcccagatgcgggatctcctgtccccgcccacagacaacaggccaggtcagatggacaatcggagcaagctccggaacatcgtggagctgcgcctggcaggcctggacatcacagatgcctccctgcggctcatcatccgccacatgcccctgctctccaagctccacctcagttactgtaaccacgtcaccgaccagtctatcaacctgctcactgctgttggcaccaccacccgagactccttaaccgagatcaacctgtctgactgcaataaggtcactgatcagtgcctgtccttcttcaaacgctgtggaaacatctgtcatattgacctgaggtactgcaagcaagtcaccaaggaaggctgtgagcagttcatagccgagatgtctgtgagtgtccagtttgggcaagtagaagaaaaactcctgcaaaaactgagttag

SEQ ID NO: 629 - DNA, 921 bp, Homo Sapiens
atggctgaagtcagcatcgaccagtccaagctgcctggagtcaaggaagtatgccgagattttgctgtcctggaggaccacaccctggctcacagcctgcaggaacaagagattgagcatcatttggcatcgaacgttcagcggaaccgtttggtccagcatgatctccaggtggctaagcagctccaagaggaagatctgaaagcgcaggcccagctccagaagcgctacaaagaccttgaacaacaagactgtgaaattgctcaggaaattcaggagaagctggctattgaggcagagagacgacgcattcaggagaagaaggatgaggacatagctcgccttttgcaagaaaaggagttacaggaagagaaaaagagaaagaaacactttccagagttccctgcaacccgtgcttatgcagatagttactattatgaagatggaggaatgaagccaagagtgatgaaagaagctgtatctactccatcacgaatggcccacagggatcaggaatggtatgatgctgaaattgccagaaaactgcaagaagaagaacttttggctacccaggtggacatgagagccgctcaagtagctcaagatgaagaaatcgctcgacttctaatggctgaagaaaagaaagcttacaaaaaagccaaggagcgggagaaatcatctttggacaaaagaaagcaagaccccgagtggaagccaaaaacagctaaagcagcaaattccaagtcaaaagagagtgatgaacctcaccattctaagaatgaaaggccagcacggccaccaccacctatcatgacagatggtgaagatgcggattacactcattttacaaaccagcagagttccacacggcatttctcaaaatcagagtcctctcataaaggttttcattacaaacattaa

SEQ ID NO: 630 - DNA, 639 bp, Homo Sapiens
atggaggtgctgcggcgctcctcggtcttcgccgccgagatcatggacgcctttgaccgctcgcccacagacaaggagctggtggcccaggccaaggcgctgggccgggagtacgtgcacgcgcggctgctgcgcgccggcctctcctggagcgcgcccgagcgtgccgcgccggtcccgggacgcctggctgaggtgtgcgcggtgctgctgcgcctgggcgatgagctggagatgatccggcccagcgtctaccgcaacgtggcgcgtcagctgcacatctccctgcagtctgagcctgtggtgaccgatgcgttcctggccgtggctggccacatcttctctgcaggcatcacgtggggcaaggtggtgtccctgtatgcggtggccgcggggctggccgtggactgtgtgaggcaggcccagcctgccatggtccacgccctcgtggactgcctgggggagttcgtgcgcaagaccctggcaacctggctgcggagacgcggcggatggactgatgtcctcaagtgtgtggtcagcacagaccctggcctccgctcccactggctggtggctgcactctgcagcttcggccgcttcctgaaggctgccttcttcgtgctgctgccagagagatga

SEQ ID NO: 631 - DNA, 849 bp, Homo Sapiens
atgctgcctctgctgcgctgcgtgccccgtgtgctgggctcctccgtcgccggcctccgcgctgccgcgcccgcctcgcctttccggcagctcctgcagccggcaccccggctgtgcacccggcccttcgggctgctcagcgtgcgcgcaggttccgagcggcggccgggcctcctgcggcctcgcggaccctgcgcctgtggctgtggctgcggctcgctgcacaccgacggagacaaagcttttgttgatttcctgagtgatgaaattaaggaggaaagaaaaattcagaagcataaaaccctccctaagatgtctggaggttgggagctggaactgaatgggacagaagcgaaattagtgcggaaagttgccggggaaaaaatcacggtcactttcaacattaacaacagcatcccaccaacatttgatggtgaggaggaaccctcgcaagggcagaaggttgaagaacaggagcctgaactgacatcaactcccaatttcgtggttgaagttataaagaatgatgatggcaagaaggcccttgtgttggactgtcattatccagaggatgaggttggacaagaagacgaggctgagagtgacatcttctctatcagggaagttagctttcagtccactggcgagtctgaatggaaggatactaattatacactcaacacagattccttggactgggccttatatgaccacctaatggatttccttgccgaccgaggggtggacaacacttttgcagatgagctggtggagctcagcacagccctggagcaccaggagtacattacttttcttgaagacctcaagagttttgtcaagagccagtag

SEQ ID NO: 632 - DNA, 906 bp, Homo Sapiens
atggccgaccagccaaaacccatcagcccgctcaagaacctgctggccggcggctttggcggcgtgtgcctggtgttcgtcggtcaccctctggacacggtcaaggtccgactgcagacacagccaccgagtttgcctggacaacctcccatgtactctgggacctttgactgtttccggaagactctttttagagagggcatcacggggctatatcggggaatggctgcccctatcatcggggtcactcccatgtttgccgtgtgcttctttgggtttggtttggggaagaaactacaacagaaacacccagaagatgtgctcagctatccccagctttttgcagctgggatgttatctggcgtattcaccacaggaatcatgactcctggagaacggatcaagtgcttattacagattcaggcttcttcaggagaaagcaagtacactggtaccttggactgtgcaaagaagctgtaccaggagtttgggatccgaggcatctacaaagggactgtgcttacccttatgcgagatgtcccagctagtggaatgtatttcatgacatatgaatggctgaaaaatatcttcactccggagggaaagagggtcagtgagctcagtgcccctcggatcttggtggctgggggcattgcagggatcttcaactgggctgtggcaatccccccagatgtgctcaagtctcgattccagactgcacctcctgggaaatatcctaatggtttcagagatgtgctgagggagctgatccgggatgaaggagtcacatccttgtacaaagggttcaatgcagtgatgatccgagccttcccagccaatgcggcctgtttccttggctttgaagttgccatgaagttccttaattgggccacccccaacttgtga

SEQ ID NO: 633 - DNA, 309 bp, Homo Sapiens
atgtcttcgcctcccgaagggaaactagagactaaagctggacacccgcccgccgtgaaagctggtggaatgcgaattgtgcagaaacacccacatacaggagacaccaaagaagagaaagacaaggatgaccaggaatgggaaagccccagtccacctaaacccactgtgttcatctctggggtcatcgcccggggtgacaaagatttccccccggcggctgcgcaggtggctcaccagaagccgcatgcctccatggacaagcatccttccccaagaacccagcacatccagcagccacgcaagtga

SEQ ID NO: 634 - DNA, 858 bp, Homo Sapiens
atgtcggaagcgggcgaggagcagcccatggagacgacgggcgccaccgagaacggacatgaggccgtccccgaaggcgagtcgccggccggggctggcacgggcgccgcggcgggggctggaggcgcgaccgcggcgcccccgagcgggaatcagaacggcgccgagggcgaccagatcaacgccagcaagaacgaggaggacgcgggaaaaatgttcgttggtggcctgagctgggatactagcaaaaaagatttaaaagactattttactaaatttggagaggtcgttgactgtacaataaaaatggatcccaacactggacggtcaagagggtttgggtttatcctgttcaaagatgcagccagtgtggagaaggtcctagaccagaaggagcacaggctggatggccgtgtcattgaccctaaaaaggccatggctatgaagaaggacccggtgaagaaaatcttcgttgggggtctgaatcctgaagccactgaggaaaagatcagggagtactttggcgagtttggggagattgaggccattgaattgccaatggatccaaagttgaacaaaagacgaggttttgtgtttatcacctttaaagaagaagaacccgtgaagaaggttctggagaaaaagttccatactgtcagtggaagcaagtgtgagatcaaggtggcccagcccaaagaagtctatcagcagcagcagtatggctctgggggccgtggaaaccgcaaccgagggaaccgaggcagcggaggtggtggtggaggtggaggtcagggtagtacaaactacggcaagagccagcgacgtggtggccatcagaataactacaagccatactga

SEQ ID NO: 635 - DNA, 846 bp, Homo Sapiens
atggggcaaaagaagcagcgaccagctagagcagggcagccacacagctcgtccgacgcagcccaggcacctgcagagcagccacacagctcgtccgatgcagcccaggcaccttgccccagggagcgctgcttgggaccgcccaccactccgggcccataccgcagcatctatttctcaagcccaaagggccaccttacccgactggggttggagttcttcgaccagccggcagtccccctggcccgggcatttctgggacaggtcctagtccggcgacttcctaatggcacagaactccgaggccgcatcgtggagaccgaggcatacctggggccagaggatgaagccgcccactcaaggggtggccggcagaccccccgcaaccgaggcatgttcatgaagccggggaccctgtacgtgtacatcatttacggcatgtacttctgcatgaacatctccagccagggggacggggcttgcgtcttgctgcgagcactggagcccctggaaggtctggagaccatgcgtcagcttcgcagcaccctccggaaaggcaccgccagccgtgtcctcaaggaccgcgagctctgcagtggcccctccaagctgtgccaggccctggccatcaacaagagctttgaccagagggacctggcacaggatgaagctgtatggctggagcgtggtcccctggagcccagtgagccggctgtagtggcagcagcccgggtgggcgtcggccatgcaggggagtgggcccggaaacccctccgcttctatgtccggggcagcccctgggtcagtgtggtcgacagagtggctgagcaggacacacaggcctga

SEQ ID NO: 636 - DNA, 2427 bp, Homo Sapiens
atggggcgcaagttggaccctacgaaggagaagcgggggccaggccgaaaggcccggaagcagaagggtgccgagacagaactcgtcagattcttgcctgcagtaagtgacgaaaattccaagaggctgtctagtcgtgctcgaaagagggcagccaagaggagattgggctctgttgaagcccctaagacaaataagtctcctgaggccaaaccattgcctggaaagctaccaaaaggagctgtccagacagctggtaagaagggaccccagtccctatttaatgctcctcgaggcaagaagcgcccagcacctggcagtgatgaggaagaggaggaggaagactctgaagaagatggtatggtgaaccacggggacctctggggctccgaggacgatgctgatacggtagatgactatggagctgactccaactctgaggatgaggaggaaggtgaagcgttgctgcccattgaaagagctgctcggaagcagaaggcccgggaagctgctgctgggatccagtggagtgaagaggagaccgaggacgaggaggaagagaaagaagtgacccctgagtcaggccccccaaaggtggaagaggcagatgggggcctgcagatcaatgtggatgaggaaccatttgtgctgccccctgctggggagatggagcaggatgcccaggctccagacctgcaacgagttcacaagcggatccaggatattgtgggaattctgcgtgattttggggctcagcgggaggaagggcggtctcgttctgaatacctgaaccggctcaagaaggatctggccatttactactcctatggagacttcctgcttggcaagctcatggacctcttccctctgtctgagctggtggagttcttagaagctaatgaggtgcctcggcccgtcaccctccggaccaataccttgaaaacccgacgccgagaccttgcacaggctctaatcaatcgtggggttaacctggatcccctgggcaagtggtcaaagactggactagtggtgtatgattcttctgtgcccattggtgctacccccgagtacctggctgggcactacatgctgcagggagcctccagcatgttgcccgtcatggccttggcaccccaggaacatgagcggatcctggacatgtgttgtgcccctggaggaaagaccagctacatggcccagctgatgaagaacacgggtgtgatccttgccaatgacgccaatgctgagcggctcaagagtgttgtgggcaacttgcatcggctgggagtcaccaacaccattatcagccactatgatgggcgccagttccccaaggtggtggggggctttgaccgagtactgctggatgctccctgcagtggcactggggtcatctccaaggatccagccgtgaagactaacaaggatgagaaggacatcctgcgctgtgctcacctccagaaggagttgctcctgagtgctattgactctgtcaatgcgacctccaagacaggaggctacctggtttactgcacctgttctatcacagtagaagagaatgagtgggtggtagactatgctctgaaaaagaggaatgtgcgactggtgcccacgggcctagactttggccaggaaggttttacccgctttcgagaaaggcgcttccaccccagtctgcgttctacccgacgcttctaccctcatacccacaatatggatgggttcttcattgccaagttcaagaaattttccaattctatccctcagtcccagacaggaaattctgaaacagccacacctacaaatgtagacttgcctcaggtcatccccaagtctgagaacagcagccagccagccaagaaagccaagggggctgcaaagacaaagcagcagctgcagaaacagcaacatcccaagaaggcctccttccagaagctgaatggcatctccaaaggggcagactcagaattgtccactgtaccttctgtcacaaagacccaagcttcctccagcttccaggatagcagtcagccagctggaaaagccgaagggatcagggagccaaaggtgactgggaagctaaagcaacgatcacctaaattacagtcctccaagaaagttgctttcctcaggcagaatgcccctcccaagggcacagacacacaaacaccggctgtgttatccccatccaagactcaggccaccctgaaacctaaggaccatcatcagccccttggaagggccaagggggttgagaagcagcagttgccagagcagccttttgagaaagctgccttccagaaacagaatgatacccccaaggggcctcagcctcccactgtgtctcccatccgttccagccgccccccaccagcaaagaggaagaaatctcagtccaggggcaacagccagctgctgctatcttag

SEQ ID NO: 637 - DNA, 786 bp, Homo Sapiens
atgttcgaggcgcgcctggtccagggctccatcctcaagaaggtgttggaggcactcaaggacctcatcaacgaggcctgctgggatattagctccagcggtgtaaacctgcagagcatggactcgtcccacgtctctttggtgcagctcaccctgcggtctgagggcttcgacacctaccgctgcgaccgcaacctggccatgggcgtgaacctcaccagtatgtccaaaatactaaaatgcgccggcaatgaagatatcattacactaagggccgaagataacgcggataccttggcgctagtatttgaagcaccaaaccaggagaaagtttcagactatgaaatgaagttgatggatttagatgttgaacaacttggaattccagaacaggagtacagctgtgtagtaaagatgccttctggtgaatttgcacgtatatgccgagatctcagccatattggagatgctgttgtaatttcctgtgcaaaagacggagtgaaattttctgcaagtggagaacttggaaatggaaacattaaattgtcacagacaagtaatgtcgataaagaggaggaagctgttaccatagagatgaatgaaccagttcaactaacttttgcactgaggtacctgaacttctttacaaaagccactccactctcttcaacggtgacactcagtatgtctgcagatgtaccccttgttgtagagtataaaattgcggatatgggacacttaaaatactacttggctcccaagatcgaggatgaagaaggatcttag

SEQ ID NO: 638 - DNA, 387 bp, Homo Sapiens
atgcagatctttgtgaagaccctcactggcaaaaccatcacccttgaggtcgagcccagtgacaccattgagaatgtcaaagccaaaattcaagacaaggagggtatcccacctgaccagcagcgtctgatatttgccggcaaacagctggaggatggccgcactctctcagactacaacatccagaaagagtccaccctgcacctggtgttgcgcctgcgaggtggcattattgagccttctctccgccagcttgcccagaaatacaactgcgacaagatgatctgccgcaagtgctatgctcgccttcaccctcgtgctgtcaactgccgcaagaagaagtgtggtcacaccaacaacctgcgtcccaagaagaaggtcaaataa

SEQ ID NO: 639 - DNA, 1902 bp, Homo Sapiens
atgccggagatccgcctccgccatgtcgtgtcctgcagcagccaggactcgactcactgtgcagaaaatcttctcaaggcagacacttaccgaaaatggcgggcagccaaggcaggcgagaagaccatctctgtggtcctacagttggagaaggaggagcagatacacagtgtggacattgggaatgatggctcagctttcgtggaggtgctggtgggcagttcagctggaggcgctggggagcaagactatgaggtccttctggtcacctcatctttcatgtccccttccgagagccgcagtggctcaaaccccaaccgcgttcgcatgtttgggcctgacaagctggtccgggcagccgccgagaagcgctgggaccgggtcaaaattgtttgcagccagccctacagcaaggactccccctttggcttgagttttgtacggtttcatagccccccagacaaagatgaggcagaggccccgtcccagaaggtgacagtgaccaagcttggccagttccgtgtgaaggaggaggatgagagcgccaactctctgaggccgggggctctcttcttcagccggatcaacaagacatccccagtcacagccagcgacccagcaggacctagctatgcagctgctaccctccaggcttctagtgctgcctcctcagcctctccagtctccagggccataggcagcacctccaagccccaggagtctcccaaagggaagaggaagttggatttgaaccaagaagaaaagaagacccccagcaaaccaccagcccagctgtcgccatctgttcccaagagacctaaattgccagctccaactcgtaccccagccacagccccagtccctgcccgagcacagggggcagtgacaggcaaaccccgaggagaaggcaccgagcccagacgaccccgagctggcccagaggagctggggaagatccttcagggtgtggtagtggtgctgagtggcttccagaaccccttccgctccgagctgcgagataaggccctagagcttggggccaagtatcggccagactggacccgggacagcacgcacctcatctgtgcctttgccaacacccccaagtacagccaggtcctaggcctgggaggccgcatcgtgcgtaaggagtgggtgctggactgtcaccgcatgcgtcggcggctgccctcccagaggtacctcatggcagggccaggttccagcagtgaggaggatgaggcctctcacagcggtggcagcggagatgaagcccccaagcttcctcagaagcaaccccagaccaaaaccaagcccactcaggcagctggacccagctcaccccagaagcccccaacccctgaagagaccaaagcagcctcaccagtgctccaggaagatatagacattgagggggtacagtcagaaggacaggacaatggggcggaagattctggggacacagaggatgagctgaggagggtggcagagcagaaggaacacagactgccccctggccaggaggagaatggggaagacccgtatgcaggctccacggatgagaacacggacagtgaggaacaccaggagcctcctgatctgccagtccctgagctcccagatttcttccagggcaagcacttctttctttacggggagttccctggggacgagcggcggaaactcatccgatacgtcacagccttcaatggggagctcgaggactatatgagtgaccgggttcagtttgtgatcacagcacaggaatgggatcccagctttgaggaggccctgatggacaacccctccctggcattcgttcgtccccgatggatctacagttgcaatgagaagcagaagttacttcctcaccagctctatggggtggtgccgcaagcctga

SEQ ID NO: 640 - DNA, 1143 bp, Homo Sapiens
atgacagaagaagttattgtgatagccaagtgggactacaccgcccagcaggaccaggagctggacatcaagaagaacgagcggctgtggttgctggacgactccaagacgtggtggcgggtgaggaacgcggccaacaggacgggctatgtaccgtccaactacgtggagcggaagaacagcctgaagaagggctccctcgtgaagaacctgaaggacacactaggcctcggcaagacgcgcaggaagaccagcgcgcgggatgcgtcccccacgcccagcacggacgccgagtaccccgccaatggcagcggcgccgaccgcatctacgacctcaacatcccggccttcgtcaagttcgcctatgtggccgagcgggaggatgagttgtccctggtgaaggggtcgcgcgtcaccgtcatggagaagtgcagcgacggttggtggcggggcagctacaacgggcagatcggctggttcccctccaactacgtcttggaggaggtggacgaggcggctgcggagtccccaagcttcctgagcctgcgcaagggcgcctcgctgagcaatggccagggctcccgcgtgctgcatgtggtccagacgctgtaccccttcagctcagtcaccgaggaggagctcaacttcgagaagggggagaccatggaggtgattgagaagccggagaacgaccccgagtggtggaaatgcaaaaatgcccggggccaggtgggcctcgtccccaaaaactacgtggtggtcctcagtgacgggcctgccctgcaccctgcgcacgccccacagataagctacaccgggccctcgtccagcgggcgcttcgcgggcagagagtggtactacgggaacgtgacgcggcaccaggccgagtgcgccctcaacgagcggggcgtggagggcgacttcctcattagggacagcgagtcctcgcccagcgacttctccgtgtcccttaaagcgtcagggaagaacaaacacttcaaggtgcagctcgtggacaatgtctactgcattgggcagcggcgcttccacaccatggacgagctggtggaacactacaaaaaggcgcccatcttcaccagcgagcacggggagaagctctacctcgtcagggccctgcagtga

SEQ ID NO: 641 - DNA, 1371 bp, Homo Sapiens
atgaagattgaggaggtgaagagcactacgaagacgcagcgcatcgcctcccacagccacgtgaaagggctggggctggacgagagcggcttggccaagcaggcggcctcagggcttgtgggccaggagaacgcgcgagaggcatgtggcgtcatagtagaattaatcaaaagcaagaaaatggctggaagagctgtcttgttggcaggacctcctggaactggcaagacagctctggctctggctattgctcaggagctgggtagtaaggtccccttctgcccaatggtggggagtgaagtttactcaactgagatcaagaagacagaggtgctgatggagaacttccgcagggccattgggctgcgaataaaggagaccaaggaagtttatgaaggtgaagtcacagagctaactccgtgtgagacagagaatcccatgggaggatatggcaaaaccattagccatgtgatcataggactcaaaacagccaaaggaaccaaacagttgaaactggaccccagcatttttgaaagtttgcagaaagagcgagtagaagctggagatgtgatttacattgaagccaacagtggggccgtgaagaggcagggcaggtgtgatacctatgccacagaattcgaccttgaagctgaagagtatgtccccttgccaaaaggggatgtgcacaaaaagaaagaaatcatccaagatgtgaccttgcatgacttggatgtggctaatgcgcggccccaggggggacaagatatcctgtccatgatgggccagctaatgaagccaaagaagacagaaatcacagacaaacttcgaggggagattaataaggtggtgaacaagtacatcgaccagggcattgctgagctggtcccgggtgtgctgtttgttgatgaggtccacatgctggacattgagtgcttcacctacctgcaccgcgccctggagtcttctatcgctcccatcgtcatctttgcatccaaccgaggcaactgtgtcatcagaggcactgaggacatcacatcccctcacggcatccctcttgaccttctggaccgagtgatgataatccggaccatgctgtatactccacaggaaatgaaacagatcattaaaatccgtgcccagacggaaggaatcaacatcagtgaggaggcactgaaccacctgggggagattggcaccaagaccacactgaggtactcagtgcagctgctgaccccggccaacttgcttgctaaaatcaacgggaaggacagcattgagaaagagcatgtcgaagagatcagtgaacttttctatgatgccaagtcctccgccaaaatcctggctgaccagcaggataagtacatgaagtga

SEQ ID NO: 642 - DNA, 3420 bp, Homo Sapiens
atgcagaccccagaggtaccagcagaaaggtcccctcgtagacggagtatctcagggaccagtacatcagagaaacccaactccatggacactgcaaatacctcacccttcaaagtaccaggattcttcagcaagcgcctgaaaggctccatcaagaggaccaaaagccagtcaaagcttgacagaaacacgagctttcggcttccatcccttcgcagtacagatgacaggtctcgtgggctgcctaaactaaaagagtcacgttcccatgaatccttgctgagcccatgcagcacagtggaatgtctggatcttggtagaggggaacctgtatcagtgaaaccacttcatagtagcatccttggacaagacttctgctttgaggttacctacttaagtggaagtaaatgcttcagctgtaattctgcttctgagagagacaagtggatggaaaaccttcgcaggacagttcaacctaataaggacaattgcaggcgagctgaaaatgttcttcgtttatggatcattgaagccaaggaccttgcccctaaaaagaaatatttctgcgaactgtgccttgatgataccctctttgctcgtacaaccagcaagaccaaagcagacaatattttctggggcgaacattttgaattcttcagccttccacctcttcatagtatcacagttcacatttacaaggatgtggaaaaaaagaaaaaaaaggacaagaataattatgtagggctagtcaacatccccactgccagtgtgactggtcgccaatttgtagaaaagtggtatccagtgagtacacctacacccaacaaaggaaagacaggaggaccttctattcggattaaatcacgtttccaaactatcaccattctgcctatggagcaatacaaagaatttgcagaatttgtcaccagcaactacaccatgctgtgttctgtccttgagccagtaattagtgtgagaaataaagaggagttggcttgtgccttagtgcacattcttcaaagtactggcagagccaaggattttctgactgacttggtgatgtctgaggtggatcgttgtggagagcatgatgtcttgatcttcagagagaacactattgccaccaaatccattgaggaatacctcaagttggtgggacaacagtatcttcatgacgcactgggggagtttatcaaagctttgtatgagtccgatgagaactgtgaagtggatcccagcaaatgttcatctagtgaactgatagaccatcagagcaacctgaaaatgtgctgtgagctggctttctgcaagatcatcaactcttactgtgttttccctcgtgagttgaaagaagtgtttgcatcatggaagcagcagtgcctgaaccgtggcaagcaagacatcagcgagaggctcatcagtgcctcattatttctccgttttctgtgtccagccattatgtctcccagtcttttcaaccttatgcaggagtatcctgatgaccgcacatctcggactctaactcttattgccaaggtcattcagaacctggccaactttgccaagtttggtaacaaagaggaatacatggcattcatgaatgattttttagaacatgaatggggtggaatgaagcgctttcttttggagatctctaatccagacaccatctcaaacaccccaggctttgatggttacattgatctgggccgagagctttcagttttgcattccttactgtgggaagtagtttcccaacttgataagggtgaaaattccttcctacaggcgaccgtggcaaaattggggcctctccctcgtgttcttgctgatattaccaagtcattgactaatcctacgccaatacaacagcaactgagacgcttcactgaacataactccagtccaaatgtcagtggaagcctctcctctgggctgcagaaaatatttgaagaccccactgacagtgatttgcataaactaaaatctccaagccaggacaacacagacagctacttcagagggaaaacattattgctggttcagcaagcctcctctcagagcatgacttattctgaaaaggatgaaagggaaagtagccttcctaatggtcggagcgtctccctcatggacctccaggacactcatgctgctcaagtggagcatgcatctgtcatgcttgatgtgcctatacgcttgaccggaagccagctttccataacccaggtggccagcatcaaacagctgcgggaaacccagagcactccccaaagtgcaccccaagtgagaaggcccctgcacccagccttgaaccagccaggtggccttcagcccttgtcgttccagaaccctgtctatcacctcaataacccaattccagcaatgccaaaggcctctatagattccagtttggagaacctaagcactgccagttccagaagccaaagtaacagtgaagacttcaagctcagtggacccagcaatagcagcatggaagatttcactaaacgtagcactcagagtgaggacttctccaggcggcacacggtgccagatagacacatacctcttgctttgccacgacaaaatagtactgggcaggcccagatccgaaaagtggaccagggtgggttaggtgcccgagccaaagccccaccatccctgccacacagtgcttctttacgtagcaccgggagcatgtcagtggtgtccgcagccctggtggccgaacctgtgcagaatgggagccggtcccggcagcagtcctcttcctccagagagagccctgttcccaaagttagagcaatccagagacaacagacacagcaggttcagtcacctgtggactctgccacaatgtccccagtagagaggacagcagcctgggttctgaacaatgggcagtatgaagaggatgtggaagaaactgagcaaaatctagatgaagccaagcatgctgagaagtatgaacaagaaattactaaactgaaggagcgcctgagagtttccagccggcgactggaggaatatgaacgccgcttgctggtgcaggagcagcagatgcagaagctgctgctggaatacaaggcccgactggaggacagcgaggagcggctccgaagacagcaggaagaaaaagatagccagatgaaaagcatcatcagcaggctaatggctgtggaagaggaactgaagaaggatcatgctgagatgcaagcagttattgatgcaaagcagaaaataattgatgcacaggaaaaacggatcgtgtccctggattcagccaacaccagactgatgagcgcgctgacccaagtgaaggagcggtacagcatgcaggtccgcaatggcatctcccccaccaaccccaccaagctttccatcacggagaatggtgaattcaaaaacagcagctgctga

SEQ ID NO: 643 - DNA, 1071 bp, Homo Sapiens
atgcaccaccagtggcttctgctggccgcatgcttttgggtgattttcatgttcatggtggctagcaagttcatcacgttgacctttaaagacccagatgtgtacagtgccaaacaggagtttctgttcctgacaaccatgccggaagtgaggaagttgccagaagagaagcacattcctgaggaactgaagccaactgggaaggagcttccagacagccagctcgttcagcccctggtctacatggagcgcctggaactcatcagaaacgtctgcagggatgatgccctgaagaatctctcgcacactcctgtctccaagtttgtcctggaccgaatatttgtctgtgacaagcacaagattcttttctgccagactcccaaagtgggcaacacccagtggaagaaagtgctgattgttctaaatggagcattttcttccattgaggagatccccgaaaacgtggtgcacgaccacgagaagaacggccttcctcggctctcttccttcagtgatgcagaaattcagaagcgattgaaaacatacttcaagttttttattgtaagagatcccttcgaaagacttatttctgcatttaaggataaatttgttcacaatccccggtttgagccttggtacaggcatgagattgctcctggcatcatcagaaaatacaggaggaaccggacagagacccgggggatccagtttgaagatttcgtgcgctacctcggcgatccgaaccacagatggctagaccttcagtttggggaccacatcattcactgggtgacgtatgtagagctctgtgctccctgtgagataatgtacagtgtgattggacaccacgagaccctggaggacgatgccccatacatcttaaaagaggctggcattgaccacctggtgtcatacccgactatccctccgggcattaccgtgtataacagaaccaaggtggagcactatttcctgggcatcagcaaacgagacatccgacgcctgtatgcccgtttcgaaggggactttaagctctttgggtaccagaaaccagactttttgctaaactaa

SEQ ID NO: 644 - DNA, 2022 bp, Homo Sapiens
atgggcggcctggcctctgggggggatgtggagccgggactgcccgtcgaggtgcgcggctccaacggggccttctacaagggctttgtgaaggatgtccatgaagactctgtcaccatcttctttgaaaacaactggcagagtgagagacaaattccttttggggatgtccggctaccacctccagctgactataataaggagatcacagaaggggatgaagtggaggtttattctcgagccaatgaacaggaaccttgtggctggtggctggcccgggtgcggatgatgaagggagatttctatgtcattgaatatgctgcctgtgatgccacctacaatgaaattgttaccctggagcgacttcggccagttaatcccaatccccttgcaaccaaaggcagcttcttcaaggttaccatggctgtgcccgaggatctgagagaagcctgctccaatgaaaacgtccataaagagttcaagaaagccctgggagccaactgcatctttctcaacatcacaaacagtgagctcttcattctgtcaaccacagaagcccctgtgaagcgagcatctctgctgggtgatatgcatttccgaagcctgcgcaccaaactgctacttatgtcccgcaatgaagaagctaccaagcacctagagacaagcaagcagttggcagcagccttccaagaggagttcacagtgcgagaggacctgatgggactggcaattgggactcacggtgccaacatccagcaggcccgaaaagtacctggggtgaccgccattgagttgggtgaagagacctgcactttccgcatctatggggagactcccgaggcttgccgacaggcccgaagctaccttgagttttctgaggactcagtgcaagtgcccaggaacctggttggcaaagtgattggaaagaacgggaaagtgatccaggagattgtggataaatctggtgtggtgagggttcgagtggaaggtgataatgacaagaagaaccccagggaggagggaatggttcccttcatttttgttggcacccgagagaacatcagcaatgcccaggctttgctggagtatcacctctcctacctgcaggaggtagagcagcttcgcttggagaggctacaaattgatgagcagcttcggcagattgggctgggctttcgccctcctgggagtgggcggggcagcggtggcagcgacaaggctggatatagcactgatgagagctcctcctcctccctccatgcgactcgaacctatgggggcagctatgggggccgtggccgtggccggaggacaggcggtcctgcctatggccccagctcagatgtgtctacagcttcagagactgagtcagagaagagagaggagcccaaccgagctgggcctggcgacagggatcccccaacccgaggggaagaaagccggaggcggccgactgggggccggggtaggggacccccacctgccccccggcccacttcgagatacaattcttcatctattagctcagtgctgaaggatccagacagtaatccctacagcctattggacacgtctgaaccagagcccccggttgattcagaacctggggaaccccccccagcaagtgccaggcgccgccgctcccgccgccgccgcactgatgaagacaggaccgtcatggatggaggcctggaatcagatgggcccaacatgacagagaatggcctggaagatgaatcaagacctcaacgtcgtaatcgcagccgccgccgccgtaaccgtggtaatcggactgatggctctatcagtggagaccgccagccagtgactgtggctgactatatctcacgagcagagtctcagagccgccagaggccacccctggaacgcactaaaccctcagaagactctctttcaggacagaagggtgactctgtcagcaagcttcctaagggcccctcggagaatggggagctctccgcccccttggagttgggtagtatggtgaatggggtttcataa

SEQ ID NO: 645 - DNA, 1401 bp, Homo Sapiens
atgccgtacgagatcaagaaggtgttcgccagcctcccgcaggtggagaggggcgtctccaagatcatcggcggcgaccctaagggcaacaattttctgtacaccaatggaaagtgcgtcatcctaaggaacatcgacgaccacagccgctttgtcaactgtgtgcgattctctcctgatgggaacagatttgccacagccagtgctgacggccagatatacatctatgacgggaagactggggagaaggtgtgcgcgctgggcggaagcaaggcccacgacggtgggatttacgcaattagttggagtcccgacagcacccatttgctttctgcttctggggacaaaacttccaagatttgggacgtcagcgtgaactccgtggtcagcacatttcccatgggctccacggttctggaccagcagctgggctgcctatggcagaaggaccacctgctcagtgtctccctgtccgggtacatcaactatctggacagaaacaaccccagcaagcccctgcacgtcatcaagggtcacagtaaatcgatccagtgtctgacggtgcataaaaacggcggcaagtcctacatttactctgggagccacgacggacacattaattactgggattcagagacgggggagaacgactccttcgctgggaaaggccacacgaaccaggtgtccaggatgaccgtggatgagtcggggcagctcatcagctgcagcatggacgacaccgtgcggtacaccagcctcatgctgcgggactacagcggacaaggagttgtgaaactggacgttcagccaaagtgcgtagccgtcggccccgggggatacgccgtggtcgtgtgcattggacagattgtcctgctgaaggatcagaggaagtgcttcagcatcgacaaccccggctacgagcccgaagttgtggcagtgcaccccggcggggacacggtggcaattgggggtgtggacggcaacgtccgcctgtattccatcctgggcaccacgctgaaggatgagggcaagctcctagaggccaagggccccgtgaccgacgtggcctactcccacgacggcgccttcctcgcggtgtgcgacgccagcaaggtggtcacagtgttcagcgttgctgacggctactcggagaacaatgttttttatggacaccatgcaaaaatcgtctgcctggcctggtccccagacaatgaacactttgcctccggtggcatggacatgatggtgtatgtttggaccctgagtgacccggaaaccagagtcaagatccaagatgcacaccggctgcaccatgtcagcagcctggcctggctggacgagcacacgctggtcacgacctcccatgatgcctctgtcaaggagtggacaatcacctactga

SEQ ID NO: 646 - DNA, 591 bp, Homo Sapiens
gagcagtgcggtggctgccggagagccaacaccacggatcggccccacgccttccaggtcattctctccgaccggccctgcctggagctaagtgccgagagcgaggccgagatggccgagtggatgcagcatctctgccaggctgtgtccaaaggggtcatcccccagggcgtagctcccagcccctgcataccctgctgcctggtcctcacggatgaccgcctctttacgtgccatgaggattgccagaccagcttcttccgctctttgggcacagccaagctgggcgacatcagcgccgtctccaccgagccgggcaaggagtactgcgtcttggagttctcccaggacagccagcagctcctcccgccctgggtcatctacctgagctgcacttctgaactggaccgattgctgtctgcactgaactctgggtggaaaaccatctatcaggtggacctcccccacacggcgatccaggaagcctccaacaagaagaaattcgaggatgccttgagcctcatccacagcgcctggcagcggagcgacagtctctgccgcggccgagcctcccgagacccctggtgctga

SEQ ID NO: 647 - DNA, 1053 bp, Homo Sapiens
atgcaccctgcagccttcccgcttcctgtggttgtggccgctgtgctgtggggagcggccccgacccgggggctcattcgagcgacctcggaccacaatgccagcatggactttgcagaccttccagctctgtttggggctaccttgagccaggagggcctccaggggttccttgtggaggctcacccagacaatgcctgcagccccattgccccaccacccccagccccggtcaatgggtcagtctttattgcgctgcttcgaagattcgactgcaactttgacctcaaggtcctaaatgcccagaaggctggatatggtgccgctgtagtacacaatgtgaattccaatgaacttctgaacatggtgtggaatagtgaggaaatccagcagcagatctggatcccgtctgtatttattggggagagaagctccgagtacctgcgtgccctctttgtctacgagaagggggctcgggtgcttctggttccagacaataccttccccttgggctattacctcatccctttcacagggattgtgggactgctggttttggccatgggagcagtaatgatagctcgttgtatccagcaccggaaacggctccagcggaatcgacttaccaaagagcaactgaaacagattcctacacatgactatcagaagggagaccagtatgatgtctgtgccatttgcctggatgaatatgaggatggggacaagctgcgggtactcccctgtgctcatgcctaccacagccgctgcgtggacccctggctcactcagacccggaagacctgccccatttgcaagcagcctgttcatcggggtcctggggacgaagaccaagaggaagaaactcaagggcaagaggagggtgatgaaggggagccaagggaccaccctgcctcagaaaggaccccacttttgggttctagccccactcttcccacctcctttggttccttagccccagctccccttgtttttcctgggccttcaacagatcccccactgtcccctccctcttcccctgttatcctggtctaa

SEQ ID NO: 648 - DNA, 4182 bp, Homo Sapiens
atgctgtcgagaccgaagccaggggagtccgaggtggacctgctgcacttccagagtcagtttctcgcagctggtgcagccccagcagtgcagttggtgaagaaaggaaataggggcggtggtgatgccaactcagaccggcctccgctccaggaccatcgggatgtggtgatgttggacaatctcccagatttgcccccagctttggtcccttctcctccaaagagagccaggcccagccctggccactgcctgcctgaggatgaggacccagaagagaggctgaggaggcatgatcagcacatcactgctgtcttgactaagattattgaacgagatacaagttcagtggccgtgaatctgcctgtgcccagtggtgttgctttccctgctgtgttccttcgctcgcgggacacacaggggaaatcagcaacatctggtaagagaagcatctttgcccaggaaattgcggcaaggaggatagctgaagccaagggcccatcagttggggaagttgtgcccaacgtgggcccaccagagggtgccgtgacctgtgagacacccactcctaggaaccagggctgccagcttcctgggagcagccacagctttcagggacccaatctggtcacagggaaggggctcagggatcaagaagctgagcaggaagcccagactatccatgaagagaacatagcaagactgcaggccatggctcctgaggagatcctgcaggaacagcagcggttgctggcccagcttgaccccagcttggttgctttcttgagatctcacagccacacgcaagagcaaacaggagagacagcctctgaggagcagaggccaggaggaccctctgctaatgtcaccaaggaggaacccctcatgtcagcttttgccagtgagcccaggaagagagacaagctggagccagaagccccagctctggcattgcccgtgacccctcagaaagaatggctgcacatggacactgtcgagctggagaagctccactggacccaggacttgccccctgtccggcggcagcagacacaggagaggatgcaggctcgattcagtcttcagggagaactactggcccctgacgtggacctgcccacccacctgggtctgcaccaccatggagaggaggcagagagagcggggtattccctacaggagctgttccacctgacccgcagccaggtttcccagcagagagcactggcactgcatgtgttagcccaggtcatcagcagggcccaggctggtgagtttggggaccggctagcaggcagtgtcttaagcctccttttggatgctggtttcctcttcctactgcgcttctccttggatgacagagtggatggggtcattgcaaccgccatccgtgctcttcgggctctgctggtggctcctggagatgaggagctcctcgacagcaccttctcttggtaccatggagctttgacgttccctctgatgcccagccaggaggacaaggaggatgaggacgaggatgaagaatgcccagcaggaaaagcaaaaaggaaaagccctgaagaagaaagccggcctccacctgacctggcccgacatgatgtcatcaaggggctcctggctaccagcctgctgcctcggctgcgctacgtgctggaggtgacatacccaggacctgcggtggtccttgacatcctggctgtgctcatccgcctggcccggcattccctggaatcagccacaagggtcctggagtgccctcggctgatagagactatagttcgagagttcttgcccaccagttggtctcctgtgggggcagggcctacccctagtctatacaaagtaccctgtgctactgccatgaaactacttcgtgtcctggcctcagctgggaggaatattgctgcccggctgttgagcagctttgatctccggagccgcctgtgccgcatcatagctgaggctccccaagaactggccttgcccccagaggaagctgagatgctgagcaccgaggccctccgtctgtgggctgtggctgcctcctatggccagggcggttacctttacagggagctctacccagtgctgatgcgggccttgcaggtggtgccgcgggagctcagcacccacccacctcaacccctgtccatgcagcggatagcctcactgctcactctcctcacccagctaaccctggcagccggcagtacccctgctgaaaccatcagtgattctgctgaggccagcctctcggccaccccttccttagtcacttggacacaggtgtctgggctccagcctcttgttgagccgtgtctaaggcagaccttgaagttgctgtccagacctgagatgtggagagccgtgggcccagtgcccgttgcctgcctgttgttcctgggagcctactaccaggcctggagccagcaaccaagctcatgcccggaggattggctccaggacatgcagcgcctgtcagaggagctgctgctgccactgctgagtcagcccacactgggcagcctgtgggattcccttaggcactgctcccttctctgcaacccgctgtcctgtgtgccagcccttgaagctccccccagcctcgtgtcactgggctgctcgggaggctgcccccgtctcagtctggctggctcagcctcacccttcccattcctcactgccctcctctctcttcttaataccctggcccagatccacaaggggctgtgtggccagctggctgccatattggctgccccgggactccagaattacttcctccagtgtgtggctcctggggctgccccacacctcacacctttctctgcatgggccctgcgccatgagtaccacctgcagtacctggcactcgctctggcccagaaagcggcagcgctgcagccactgccagccacccatgctgccctctatcatggtatggccttggccctgctgagccggctgctgcccggaagtgagtacctcacccatgagctgctgctgagctgtgtattccggctggagttcctcccggaaagaacatcagggggtccagaggcagccgacttctctgaccagctgtcgttaggaagcagcagggtccctcggtgtgggcaagggactctgctggctcaggcctgccaggacctccccagcatccgcaactgctacctgactcattgctcgccagcccgagccagtctgctggcctcccaggctctgcaccgaggggagctacagcgagtcccaaccctgctactgcccatgcctacggagccgctgctgcccaccgactggcccttcctgccactgattcgcctctaccaccgggcttcagacaccccctcgggactctctcccacagacaccatgggcacagccatgcgggtcctgcagtgggtgctagttttggagagctggcgcccccaggctctctgggctgtgccccctgctgcccgcctggcacggctcatgtgtgtgttcctggtggacagtgagctgttccgggagtccccagtacagcatctggtggcagccctcctcgcccagctctgtcagcctcaagtcttgccaaacctcaacctggactgccgactccctggcctgacgtctttccctgacctctatgccaacttcctggatcattttgaggctgtctcttttggggaccacctctttggggccctggtcctcctgcccctgcagcgtcggttcagtgtcaccttgcgccttgccctctttggggaacacgtgggagccttgcgagctctgagcctgcctctgacccagttgcctgtgtccctggagtgttacacagtgcctcctgaagacaacctggccctccttcagctctacttccggaccctggttactggtgcgctccgcccacgttggtgccccgtgctctatgctgtggctgtggctcatgtcaatagcttcatcttctctcaggacccacagagctcagatgaggtcaaagctgcccgcaggagtatgctgcagaaaacatggctgctggcagatgagggtctccggcagcacctcctgcactataagcttcccaattccacgctcccagagggctttgagctctattctcagttgccccctctgcgtcagcactacctccagagactgacttcaacagtgctccaaaatggggtatcagagacctag

SEQ ID NO: 649 - DNA, 582 bp, Homo Sapiens
atggcccgcgcacgccaggagggcagctccccggagcccgtagagggcctggcccgcgacggcccgcgccccttcccgctcggccgcctggtgccctcggcagtgtcctgcggcctctgcgagcccggcctggctgccgcccccgccgcccccaccctgctgcccgctgcctacctctgcgcccccaccgccccacccgccgtcaccgccgccctggggggttcccgctggcctgggggtccccgcagccggccccgaggcccgcgcccggacggtcctcagccctcgctctcgctggcggagcagcacctggagtcgcccgtgcccagcgccccgggggctctggcgggcggtcccacccaggcggccccgggagtccgcggggaggaggaacagtgggcccgggagatcggggcccagctgcggcggatggcggacgacctcaacgcacagtacgagcggcggagacaagaggagcagcagcggcaccgcccctcaccctggagggtcctgtacaatctcatcatgggactcctgcccttacccaggggccacagagcccccgagatggagcccaattag

SEQ ID NO: 650 - DNA, 936 bp, Homo Sapiens
atgctgcagttcgtccgggccggggcgcgggcctggcttcggcctaccggcagccagggcctgagttccctggcggaagaggcagcgcgtgcgaccgagaacccggagcaggtggcgagcgagggtctcccggagcccgtgctgcgcaaagtcgagctcccggtacccactcatcgacgcccagtgcaggcctgggtcgagtccttgcggggcttcgagcaggagcgcgtgggcctggccgacctgcaccccgatgttttcgccaccgcgcccaggctggacatactgcaccaggttgctatgtggcagaagaacttcaagagaattagctatgccaagaccaagacgagagccgaggtgcggggcggtggccggaagccttggccgcagaaaggcactgggcgggcccggcatggcagcatccgctctccgctctggcgaggaggaggtgttgcccatggcccccggggccccacaagttactactacatgctgcccatgaaggtgcgggcgctgggtctcaaagtggcactgaccgtcaagctggcccaggacgacctgcacatcatggactccctagagctgcccaccggagacccacagtacctgacagagctggcgcactaccgccgctggggggactccgtactcctcgtggacttaacacacgaggagatgccacagagcatcgtggaggccacctctaggcttaagaccttcaacttgatcccggctgttggcctaaatgtgcacagcatgctcaagcaccagacgctggtcctgacgctgcccaccgtcgccttcctggaggacaagctgctctggcaggactcacgttacagacccctctaccccttcagcctgccctacagcgacttcccccgacccctaccccacgctacccagggcccagcggccaccccgtaccactgttga

SEQ ID NO: 651 - DNA, 1518 bp, Homo Sapiens
atgagtcgcagctataatgatgagctgcagttcttggagaagatcaataaaaactgctggaggatcaagaagggcttcgtgcccaacatgcaggttgaaggtgttttctatgtgaatgatgctctggagaaattgatgtttgaggaattaaggaatgcctgtcgaggtggtggtgttggtggcttcctgccagccatgaaacagattggcaatgtggcagccctgcctggaattgttcatcgatctattgggcttcctgatgtccattcaggatatgggtttgctattgggaacatggcagcctttgatatgaatgaccctgaagcagtagtatccccaggtggtgtcgggtttgacatcaactgtggtgtccgcttgctaagaaccaatttagatgaaagtgatgtccagcctgtgaaggagcaacttgcccaagctatgtttgaccacattcctgttggggtggggtcaaaaggtgtcatcccaatgaatgccaaagacttggaggaggccttggagatgggggtggactggtccttaagagaagggtatgcctgggctgaagacaaggagcactgcgaggagtacggaaggatgctgcaggctgaccccaataaagtttctgcaagggcgaagaaaagaggccttcctcagttggggaccctgggagcaggcaaccattatgcagaaatccaggttgtggatgagattttcaatgagtatgctgctaaaaaaatgggcatcgaccataagggacaggtgtgtgtgatgatccacagtggaagcagaggcttgggccaccaagtagccacagatgcgctggtagctatggagaaggccatgaagagagacaagattatagtcaatgatcggcagttggcttgtgctcgaatcgcttccccagagggtcaagactatctgaagggaatggcagctgctgggaactatgcctgggtcaaccgctcttccatgaccttcttaacccgtcaggctttcgccaaggtcttcaacacaacccctgatgacttggacctacatgtgatctatgatgtttctcacaacattgccaaagtggagcagcatgtggtggacggaaaggaacggacactgttagtacacaggaagggatccacccgcgctttccctcctcaccatcccctcattgctgttgattaccaactcactggacagccagtgctcattggtggcaccatgggaacctgtagttatgttcttactggcactgaacagggcatgactgagacctttggaacaacctgtcatggagcgggccgtgcattgtcccgagcaaaatctcgacgtaatttagatttccaggatgtcttagacaaattggcagatatgggaattgcgatccgtgttgcctcacccaaactggttatggaagaggctcctgagtcctataagaatgtgacagatgtggtaaatacctgccatgatgctggaatcagcaagaaagccattaaactgagaccaattgctgtgatcaaaggatag

SEQ ID NO: 652 - DNA, 3744 bp, Homo Sapiens
atgtcactttttttaagggtagtatttagtttcacaatgtttggggacctgtttgaagaggagtattccactgtgtctaataatcagtatggaaaagggaagaaattaaagactaaagctttggagccacctgctcctagagaattcaccaatttaagcggaatcagaaatcagggtggaacctgttacctcaattcccttcttcagactcttcatttcacacctgaattcagagaagctctattttctcttggcccagaagagcttggtttgtttgaagataaggataaacccgatgcaaaggttcgaatcatccctttacagttacagcgcttgtttgctcagcttctgctcttagaccaggaagctgcatccacagcagacctcactgacagctttgggtggaccagtaatgaggaaatgaggcaacatgatgtgcaggaactgaatcgaatcctcttcagcgctttggaaacttctttagttgggacctccggtcatgacctcatctatcgtctgtaccatggaaccattgttaaccagattgtttgtaaagaatgtaagaacgttagcgagaggcaggaagacttcttagatctaacagtagcagtcaaaaatgtatccggtttggaagatgctctctggaacatgtatgtagaagaggaagtttttgattgtgacaacttgtaccactgtggaacttgtgacaggctggttaaagcagcaaagtcggccaaattacgtaagctgcctccttttcttactgtttcattactaagatttaattttgattttgtgaaatgcgaacgctacaaggaaactagctgttatacattccctctccggattaatctcaagcccttttgtgaacagagtgaattggatgacttagaatatatatatgacctcttctcagttattatacacaaaggtggctgctacggaggccattaccatgtatatattaaagatgttgatcatttgggaaactggcagtttcaagaggaaaaaagtaaaccagatgtgaatctgaaagatctccagagtgaagaagagattgatcatccactgatgattctaaaagcaatcttattagaggagaataatctaattcctgttgatcagctgggccagaaacttttgaaaaagataggaatatcttggaacaagaagtacagaaaacagcatggaccactgcggaagttcttacagctccattctcagatatttctactcagttcagatgaaagtacagttcgtctcttgaagaatagttctctccaggctgagtctgatttccaaaggaatgaccagcaaattttcaagatgcttcctccagaatccccaggtttaaacaatagcatctcctgtccccactggtttgatataaatgattctaaagtccagccaatcagggaaaaggatattgaacagcaatttcagggtaaagaaagtgcctacatgttgttttatcggaaatcccagttgcagagaccccctgaagctcgagctaatccaagatatggggttccatgtcatttactgaatgaaatggatgcagctaacattgaactgcaaaccaaaagggcagaatgtgattctgcaaacaatacttttgaattgcatcttcacctgggccctcagtatcatttcttcaatggggctctgcacccagtagtctctcaaacagaaagcgtgtgggatttgacctttgataaaagaaaaactttaggagatctccggcagtcaatatttcagctgttagaattttgggaaggagacatggttcttagtgttgcaaagcttgtaccagcaggacttcacatttaccagtcacttggcggggatgaactgacactgtgtgaaactgaaattgctgatggggaagacatctttgtgtggaatggggtggaggttggtggagtccacattcaaactggtattgactgcgaacctctacttttaaatgttcttcatctagacacaagcagtgatggagaaaagtgttgtcaggtgatagaatctccacatgtctttccagctaatgcagaagtgggcactgtcctcacagccttagcaatcccagcaggtgtcatcttcatcaacagtgctggatgtccaggtggggagggttggacggccatccccaaggaagacatgaggaagacgttcagggagcaagggctcagaaatggaagctcaattttaattcaggattctcatgatgataacagcttgttgaccaaggaagagaaatgggtcactagtatgaatgagattgactggctccacgttaaaaatttatgccagttagaatctgaagagaagcaagttaaaatatcagcaactgttaacacaatggtgtttgatattcgaattaaagccataaaggaattaaaattaatgaaggaactagctgacaacagctgtttgagacctattgatagaaatgggaagcttctttgtccagtgccggacagctatactttgaaggaagcagaattgaagatgggaagttcattgggactgtgtcttggaaaagcaccaagttcgtctcagttgttcctgttttttgcaatggggagtgacgttcaacctgggacagaaatggaaatcgtagtagaagaaacaatatctgtgagagattgtttaaagttaatgctgaagaaatctggcctacaaggagatgcctggcatttacgaaaaatggattggtgctatgaagctggagagcctttatgtgaagaagatgcaacactgaaagaacttctgatatgttctggagatactttgcttttaattgaaggacaacttcctcctctgggtttcctgaaggtgcccatctggtggtaccagcttcagggtccctcaggacactgggagagtcatcaggaccagaccaactgtacttcgtcttggggcagagtttggagagccacttccagccaaggtgcttctgggaacgagcctgcgcaagtttctctcctctacttgggagacatagagatctcagaagatgccacgctggcggagctgaagtctcaggccatgaccttgcctcctttcctggagttcggtgtcccgtccccagcccacctcagagcctggacggtggagaggaagcgcccaggcaggcttttacgaactgaccggcagccactcagggaatataaactaggacggagaattgagatctgcttagagccccttcagaaaggcgaaaacttgggcccccaggacgtgctgctgaggacacaggtgcgcatccctggtgagaggacctatgcccctgccctggacctggtgtggaacgcggcccagggtgggactgccggctccctgaggcagagagttgccgatttctatcgtcttcccgtggagaagattgaaattgccaaatactttcccgaaaagttcgagtggcttccgatatctagctggaaccaacaaataaccaagaggaaaaagaaaaaaaaacaagattatttgcaaggggcaccgtattacttgaaagacggagatactattggtgttaagaatctcctgattgacgacgatgatgatttcagtacaatcagagatgacactggaaaagaaaagcagaaacaacgggccctggggagaaggaaaagccaagaagccctccatgagcagagcagctacatcctctccagtgcagagacgcctgcccggccccgagccccggaaacttctctctccatccacgtggggagcttcagataa

SEQ ID NO: 653 - DNA, 2481 bp, Homo Sapiens
atgtgggcgctttgctcgctgctgcggtccgcggccggacgcaccatgtcgcagggacgcaccatatcgcaggcacccgcccgccgcgagcggccgcgcaaggacccgctgcggcacctgcgcacgcgagagaagcgcggaccgtcggggtgctccggcggcccaaacaccgtgtacctgcaggtggtggcagcgggtagccgggactcgggcgccgcgctctacgtcttctccgagttcaaccggtatctcttcaactgtggagaaggcgttcagagactcatgcaggagcacaagttaaaggttgctcgcctggacaacatattcctgacacgaatgcactggtctaatgttgggggcttaagtggaatgattcttactttaaaggaaaccgggcttccaaagtgtgtactttctggacctccacaactggaaaaatacctcgaagcaatcaaaatattttctggtccattgaaaggaatagaactggctgtgcggccccactctgccccagaatacgaggatgaaaccatgacagtttaccagatccccatacacagtgaacagaggaggggaaagcaccaaccatggcagagtccagaaaggcctctcagcaggctcagtccagagcgatcttcagactccgagtcgaatgaaaatgagccacaccttccacatggtgttagccagagaagaggggtcagggactcttccctggtcgtagctttcatctgtaagcttcacttaaagagaggaaacttcttggtgctcaaagcaaaggagatgggcctcccagttgggacagctgccatcgctcccatcattgctgctgtcaaggacgggaaaagcatcactcatgaaggaagagagattttggctgaagagctgtgtactcctccagatcctggtgctgcttttgtggtggtagaatgtccagatgaaagcttcattcaacccatctgtgagaatgccacctttcagaggtaccaaggaaaggcagatgcccccgtggccttggtggttcacatggccccagcatctgtgcttgtggacagcaggtaccagcagtggatggagaggtttgggcctgacacccagcacttggtcctgaatgagaactgtgcctcagttcacaaccttcgcagccacaagattcaaacccagctcaacctcatccacccggacatcttccccctgctcaccagtttccgctgtaagaaggagggccccaccctcagtgtgcccatggttcagggtgaatgcctcctcaagtaccagctccgtcccaggagggagtggcagagggatgccattattacttgcaatcctgaggaattcatagttgaggcgctgcagcttcccaacttccagcagagcgtgcaggagtacaggaggagtgcgcaggacggcccagccccagcagagaaaagaagtcagtacccagaaatcatcttccttggaacagggtctgccatcccgatgaagattcgaaatgtcagtgccacacttgtcaacataagccccgacacgtctctgctactggactgtggtgagggcacatttgggcagctgtgccgtcattacggagaccaggtggacagggtcctgggcaccctggctgctgtgtttgtgtcccacctgcacgcagatcaccacacgggcttgccaagtatcttgctgcagagagaacgcgccttggcatctttgggaaagccgcttcaccctttgctggtggttgcccccaaccagctcaaagcctggctccagcagtaccacaaccagtgccaggaggtcctgcaccacatcagtatgattcctgccaaatgccttcaggaaggggctgagatctccagtcctgcagtggaaagattgatcagttcgctgttgcgaacatgtgatttggaagagtttcagacctgtctggtgcggcactgcaagcatgcgtttggctgtgcgctggtgcacacctctggctggaaagtggtctattccggggacaccatgccctgcgaggctctggtccggatggggaaagatgccaccctcctgatacatgaagccaccctggaagatggtttggaagaggaagcagtggaaaagacacacagcacaacgtcccaagccatcagcgtggggatgcggatgaacgcggagttcattatgctgaaccacttcagccagcgctatgccaaggtccccctcttcagccccaacttcagcgagaaagtgggagttgcctttgaccacatgaaggtctgctttggagactttccaacaatgcccaagctgattcccccactgaaagccctgtttgctggcgacatcgaggagatggaggagcgcagggagaagcgggagctgcggcaggtgcgggcggccctcctgtccagggagctggcaggcggcctggaggatggggagcctcagcagaagcgggcccacacagaggagccacaggccaagaaggtcagagcccagtga

SEQ ID NO: 654 - DNA, 1635 bp, Homo Sapiens
atgatgacaggtcagaccatgagcgagagaggcacaaagaaaagaaaaagaagaagaagaagaagtccgagaaggagaagcatctggacgatgaggaaagaaggaagcgaaaggaagagaagaagcggaagcgagagagggagcactgtgacacggagggagaggctgacgactttgatcctgggaagaaggtggaggtggagccgcccccagatcggccagtccgagcgtgccggacacagccagccgaaaatgagagcacacctattcagcaactcctggaacacttcctccgccagcttcagagatccccatggattttttgcttttcctgtcacggatgcaattgctcctggatattcaatgataataaaacatcccatggattttggcaccatgaaagacaaaattgtagctaatgaatacaagtcagttacggaatttaaggcagatttcaagctgatgtgtgataatgcaatgacatacaataggccagataccgtgtactacaagttggcgaagaagatccttcacgcaggctttaagatgatgagcaaacaggcagctcttttgggcaatgaagatacagctgttgaggaacctgtccctgaagttgtaccagtacaagtagaaactgccaagaaatccaaaaagccgagtagagaagttatcagctgcatgtttgagcctgaagggaatgcctgcagcttgacggacagtaccgcagaggagcacgtgctggcgctggtggagcacgcagctgacgaagctcgggacaggatcaaccggttcctcccaggcggcaagatgggctatctgaagaggaacggggacgggagcctgctctacagcgtggtcaacacggccgagccggacgctgatgaggaggagacccacccggtggacttgagctcgctctccagtaagctactcccaggcttcaccacgctgggcttcaaagacgagagaagaaacaaagtcacctttctctccagtgccactactgcgctttcgatgcagaataattcagtatttggcgacttgaagtcggacgagatggagctgctctactcagcctacggagatgagacaggcgtgcagtgtgcgctgagcctgcaggagtttgtgaaggatgctgggagctacagcaagaaagtggtggacgacctcctggaccagatcacaggcggagaccactctaggacgctcttccagctgaagcagagaagaaatgttcccatgaagcctccagatgaagccaaggttggggacaccctaggagacagcagcagctctgttctggagttcatgtcgatgaagtcctatcccgacgtttctgtggatatctccatgctcagctctctggggaaggtgaagaaggagctggaccctgacgacagccatttgaacttggatgagacgacgaagctcctgcaggacctgcacgaagcacaggcggagcgcggcggctctcggccgtcgtccaacctcagctccctgtccaacgcctccgagagggaccagcaccacctgggaagcccttctcgcctgagtgtcggggagcagccagacgtcacccacgacccctatgagtttcttcagtctccagagcctgcggcctctgccaagacctaa

SEQ ID NO: 655 - DNA, 603 bp, Homo Sapiens
atggatgacaaaaagaagaaacggagtcccaagccctgcctggcccagccagcccaggccccaggcacactacggagggtccctgtgcctaccagccacagcggctccttggccctaggacttcctcatctgccatcccccaagcagcgggccaagttcaagagagtaggcaaagagaagtgccgcccagtcctggctggaggtggaagcggctctgcaggcacgcccctgcagcactccttcctgaccgaggtgactgatgtctatgagatggaggggggactcctgaacctgctcaatgatttccactctggccggctgcaggccttcgggaaggaatgctcctttgagcagctggagcacgttcgggagatgcaggagaagctagcccggctgcacttcagcctggatgtgtgtggggaggaggaggacgatgaagaggaagaggatggggtcactgaggggctgccagaggagcagaagaagacaatggctgaccgtaacctggaccagctgcttagcaatctggaagacctcagtaattctatccagaagctgcacctggccgagaacgccgagcctgaggagcagtccgctgcgtag

SEQ ID NO: 656 - DNA, 1491 bp, Homo Sapiens
atggaagaacagagggaggccctgaggaagatcatcaaaacactggctgtgaagaatgaagaaattcagagctttatctactccctgaaacagatgctgctgaacgtggaggcgaactcggcgaaggtgcaggaggacctcgaagcagagttccagtccctcttctccctcctggaggagctgaaagaaggcatgcttatgaagataaaacaggaccgtgccagccgtacctacgagctgcagaaccagctggctgcctgcacgcgggccctggagagctccgaggagcttctggagacagccaaccagactctgcaggccatggacagcgaggactttcctcaggctgccaagcaaatcaaagatggagtgaccatggcccctgccttccggctatcattgaaagcgaaggtcagtgacaacatgagtcacctcatggtggacttcgcgcaagagcggcagatgctacaggcactcaagttcctgcctgtgcccagcgcacccgtgatcgacctggctgagtccctggtggcagataactgtgtgaccctggtgtggcgcatgccggatgaggacagcaagattgaccactacgtgctggagtaccggcggaccaacttcgagggcccgccccgcctcaaggaggaccagccctggatggtcatcgagggcatccggcagacagagtacaccctgacaggtctcaagtttgacatgaaatacatgaacttccgtgtgaaggcctgtaacaaggcagttgcaggagagttctctgagccggtgactctggagacaccagcgttcatgttccgcctggatgcgtccacatcccaccagaacctgcgggtggatgatctctccgtggagtgggacgctatgggcgggaaggtgcaggatatcaaggctcgcgagaaagatggcaaggggcggacggcgtctcccatcaactccccagccagaggtactccatctcccaagaggatgccctcaggtcgtgggggacgggaccgcttcaccgctgagtcctacacagttctgggggacacgctgatcgacggcggggagcattactgggaggtgcgctacgagccggacagcaaggcgttcggcgtgggcgtggcctaccgcagcctgggccgcttcgagcaactgggcaagacggccgcctcctggtgcctgcacgtcaacaattggctgcaggtcagcttcacggccaagcacgccaacaaggtcaaggtgctggacgcccccgtgcccgactgcctgggtgtgcactgtgacttccaccaaggcctcctgtccttctacaatgcccgcaccaaacaagtgctgcacactttcaagaccaggttcacacagccgctgctgcctgctttcacggtatggtgtggcagcttccaggtgacgacaggcctgcaggtccccagtgctgtgcgctgcctgcaaaagcgaggcagtgctaccagcagctccaacaccagcctcacctag

SEQ ID NO: 657 - DNA, 315 bp, Homo Sapiens
atgtcatatttagcgtttttatatatgacctttgatttctgttgtttgtattttagcacagtgtatgcaccttcatttaaatacatctgtgtgcatacagatacgcatatatgtgtgtgcgtatgcatatatctctcatctgtagtttccaagagttcagctgaagcagatggagtcctgcagcccaggagacaccctgcatccctgctaatagtgtttgccacaagtattagtgagtcttccttattaatattttcatttcagaagactgaagcaaagctgatagtgtttgctgtttctttggcagctaagtga

SEQ ID NO: 658 - DNA, 2559 bp, Homo Sapiens
atgtcatcagtgagccccatccagatccccagtcgcctcccgctgctgctcacccacgagggcgtcctgctgcccggctccaccatgcgcaccagcgtggactcggcccgcaacctgcagctggtgcggagccgccttctgaagggcacgtcgctgcaaagcaccatcctgggcgtcatccccaacacgcctgaccccgccagcgacgcgcaggacctgccgccgctgcacaggattggcacagctgcactggccgttcaggttgtgggcagtaactggcccaagccccactacactctgttgattacaggcctatgccgtttccagattgtacaggtcttaaaagagaagccatatcccattgctgaagtggagcagttggaccgacttgaggagtttcccaacacctgtaaaatgagggaggagctaggagaactatcagagcagttttacaaatatgcagtacaattggttgaaatgttggatatgtctgtccctgcagttgctaaattgagacgtcttttagatagtcttccaagggaagctttaccagacatcttgacatcaattatccgaacaagcaacaaagagaaactccagattttagatgctgtgagcctagaggagcggttcaagatgactataccactgcttgtcagacaaattgaaggcctgaaattgcttcaaaaaaccagaaaacccaagcaagatgatgataagagggttatagcaatacgccctattaggagaattacacatatctcaggtactttagaagatgaagatgaagatgaagataatgatgacattgtcatgctagagaaaaaaatacgaacatctagtatgccagagcaggcccataaagtctgtgtcaaagagataaagagactcaaaaaaatgcctcagtcaatgccagaatatgctctgactagaaattatttggaacttatggtagaacttccttggaacaaaagtacaactgaccgcctggacattagggcagcccggattcttctggataatgaccattacgccatggaaaaattgaagaaaagagtactggaatacttggctgtcagacagctcaaaaataacctgaagggcccaatcctatgctttgttggccctcctggagttggtaaaacaagtgtgggaagatcagtggccaagactctaggtcgagagttccacaggattgcacttggaggagtatgtgatcagtctgacattcgaggacacaggcgcacctatgttggcagcatgcctggtcgcatcatcaacggcttgaagactgtgggagtgaacaacccagtgttcctattagatgaggttgacaaactgggaaaaagtctacagggtgatccagcagcagctctgcttgaggtgttggatcctgaacaaaaccataacttcacagatcattatctaaatgtggcctttgacctttctcaagttctttttatagctactgccaacaccactgctaccattccagctgccttgttggacagaatggagatcattcaggttccaggttatacacaggaggagaagatagagattgcccataggcacttgatccccaagcagctggaacaacatgggctgactccacagcagattcagataccccaggtcaccactcttgacatcatcaccaggtataccagagaggcaggggttcgttctctggatagaaaacttggggccatttgccgagctgtggccgtgaaggtggcagaaggacagcataaggaagccaagttggaccgttctgatgtgactgagagagaaggttgcagagaacacatcttagaagatgaaaaacctgaatctatcagtgacactactgacttggctctaccacctgaaatgccgattttgattgatttccatgctctgaaagacatccttgggcccccgatgtatgaaatggaggtatctcagcgtttgagtcagccaggagtagcaataggtttggcttggactcccttaggtggagaaatcatgttcgtggaggcgagtcgaatggatggcgagggccagttaactctgaccggccagctcggggacgtgatgaaggagtccgcccacctcgctatcagctggctccgcagcaacgcaaagaagtaccagctgaccaatgcttttggaagttttgatcttcttgacaacacagacatccatctgcacttcccagctggagctgtcacaaaagatggaccatctgctggagttaccatagtaacctgtctcgcctcactttttagtgggcggctggtacgttcagatgtagccatgactggagaaattacactgagaggtcttgttcttccagtgggtggaattaaagacaaagtgctggcggcacacagagcgggactgaagcaagtcattattcctcggagaaatgaaaaagaccttgagggaatcccaggcaacgtacgacaggatttaagttttgtcacagcaagctgcctggatgaggttcttaatgcagcttttgatggtggctttactgtcaagaccagacctggtctgttaaatagcaaactgtag

SEQ ID NO: 659 - DNA, 3618 bp, Homo Sapiens
atgaccaagaaggaggagcccccaccgagccgagtcccacgggccgtgcgcgtggccagtctgctgagcgagggagaggaactgtctggggacgaccaaggggatgaggaagaggatgaccacgcctatgagggcgtccccaatggcggatggcataccagcagcctgagcttgtccttgcccagcacaatagctgcgccacaccccatggacgggccgcctgggggctccacccccgtcacaccagtcatcaaggctggctggctggacaagaacccaccgcagggatcttacatctatcagaaacgatgggtgagactggatactgatcacctgcgatactttgacagtaacaaggacgcttactctaagcgctttatctctgtggcctgcatctcccacgtggctgccatcggggaccagaagtttgaagtgatcacaaacaaccgaacctttgccttccgggcagagagtgatgtggagcggaaggagtggatgcaggccctgcagcaggccatggctgagcagcgtgcccgggcccggctctctagcgcttatctgctgggagttccaggctcagagcagcctgaccgcgctggcagcctggagcttcgtggcttcaagaataagctgtacgtggccgtggtcggggacaaagtgcagctctacaagaatctagaggagtaccacctgggcattggcatcaccttcatcgacatgagcgtgggcaacgtgaaggaagtggaccggcgcagcttcgacctcaccacgccctaccgcatcttcagcttctctgctgactcagagctagagaaggagcagtggttggaggccatgcagggagccatcgctgaggccctgtctacctcggaggtggccgagcgcatctgggctgcagcccccaacaggttctgtgctgactgcggggctcctcagcctgactgggcctccatcaacctctgtgttgttatctgcaagcgctgtgcaggggagcaccgtggcctgggcgctggcgtctccaaggtgcggagcctgaagatggacaggaaggtgtggacagaaacacttatcgagctcttcttacagctggggaatggcgctgggaaccgcttctgggcagccaacgtgccccccagtgaggccctgcagcccagcagcagccccagcacccggcggtgccacctggaggccaagtaccgtgagggcaagtaccgccgctaccacccgctctttggcaaccaggaggagctggacaaggccctgtgtgctgcagtcaccaccacagacctggctgagacccaggcgctcctgggctgtggggctgggatcaactgcttctcgggggaccctgaggcccccacgcccctggctcttgcagagcaggcggggcagacgctgcagatggaattccttcggaacaaccggaccacagaggtgcctcggctggactcgatgaagcccctggaaaagcactactcagttgtcctgccgaccgtgagccacagtggcttcctctacaagactgcctctgccggcaagctgctacaggaccgccgggcccgggaagagttcagccggcgctggtgtgtccttggtgacggggtcctgagctactttgagaatgagcgggcagtgacccccaatggagagattcgggccagcgagattgtgtgcctggcagtgccccctcctgacacccatggctttgagcacacctttgaggtgtacacggagggagaacggctgtacctgtttgggctggagagtgcggagcaggctcatgagtgggtcaagtgtattgctaaggcattcgtgcctcccctagccgaggatctgctggcccgggattttgagcggctgggacgcctaccctacaaagctggcctgagcctacagcgggcccaggagggctggttctctctcagtggctcggagctccgtgctgtcttcccggaggggccctgcgaagagccgctgcaactacggaaactgcaggagctttccatccagggggacagtgagaaccaggtgctggtgctggtggagcgaaggaggacactgtacatacagggcgagcggcggctggacttcatgggttggctgggggccatccagaaagcagccgccagcatgggggacacgctgtcggagcagcagcttggggactcggatatcccggtgatcgtgtaccgctgtgtggactacatcacgcagtgcggcctgacctccgagggcatctaccgcaagtgtgggcagacatcgaagacacagcggctgctggagagcctgcggcaggatgcgcgctctgtgcacctcaaggagggcgagcagcacgtggatgatgtttcctcggcgctcaagcgcttcctgcgcgacctgcctgatgggctcttcactcgcgcccagcgcctaacctggctggaggcctcagagattgaggacgaggaggagaaggtctccaggtaccgagagctgctggtgcggctgccccctgtcaaccgggccacagtgaaggcccttatcagccacctgtactgtgttcagtgcttctcagacacgaaccagatgaacgtgcacaacctggcaattgtgtttgggcccacgctcttccagacagatgggcaggactacaaggctggccgtgtggtggaagacctcattaaccactatgtggtggtgtttagtgtggatgaggaagagctcaggaagcagcgggaggagatcactgccattgtgaagatgcgcgtggctggcactgccagtgggacccagcatgccggtgacttcatctgcacagtgtatctggaagagaagaaggcagagactgagcagcatatcaaggtcccagcatccatgactgctgaggagctcaccctggagatcctggatcgccggaacgtgggcatcagggagaaggactattggacctgctttgaggtcaacgagagggaggaggcagagcgccccctgcactttgcggagaaggtgctgcccatcctgcacgggctgggcacggacagccacctggtggtgaagaagcaccaggccatggaggccatgctgctgtacctggccagccgtgtcggtgacaccaagcatggcatgatgaagttccgtgaggaccgcagcctcctgggcctgggcctgccctcaggtggcttccacgatcgctacttcatcctcaacagcagctgcttgcggctctacaaggaggtccggagccagaggccgtggagcggggcccctgagaccagtcaccggcctgagaaggagtggcctattaagagtctcaaagtctacctgggagtgaagaagaaactcaggccacccacctgctggggcttcacagtggtgcatgagacagagaaacatgagaagcagcagtggtacctctgctgtgacacacagatggagctccgggagtggttcgctacctttctgtttgtgcagcatgacggcctggtgtggccctcagagccctcacgcgtgtcccgggcagtgcctgaggtccggctgggtagtgtgtcactgatcccccttcgaggtagtgaaaatgaaatgcgccggagtgtggctgccttcaccgcggaccctctgtctcttctgcgcaacgtctga

SEQ ID NO: 660 - DNA, 357 bp, Homo Sapiens
atggtggcccgggtgtggtcgctgatgaggttcctcatcaagggaagtgtggctgggggcgccgtctacctggtgtacgaccaggagctgctggggcccagcgacaagagccaggcagccctacagaaggctggggaggtggtcccccccgccatgtaccagttcagccagtacgtgtgtcagcagacaggcctgcagataccccagctcccagcccctccaaagatttactttcccatccgtgactcctggaatgcaggcatcatgacggtgatgtcagctctgtcggtggccccctccaaggcccgcgagtactccaaggagggctgggagtatgtgaaggcgcgcaccaagtag

SEQ ID NO: 661 - DNA, 2658 bp, Homo Sapiens
atgagccatcctgactacagaatgaacctccggcccctggggacccccagaggtgtgtctgctgtggctggtccacatgacattggtgcttcgccaggtgacaaaaagtcaaagaacaggtccacacgagggaagaaaaagagcatatttgaaacttacatgtccaaggaggatgtttcagaaggcttgaagagaggaacactcatccagggtgtattgagaattaatccaaagaagtttcatgaagccttcattccttccccggatggtgatcgagacatttttattgatggggttgttgctcgtaatagagccttaaatggggatctggtggtcgtgaaactgcttcccgaggagcattggaaggtagttaaaccagagagcaatgacaaagaaacagaagctgcgtatgaatcagatatccccgaggagctctgtggacaccatctcccgcaacagtccctgaaaagctataatgacagtcctgatgtcattgtagaggctcagtttgatggcagcgactcagaagatggacatggcatcacacaaaatgtgctggttgatggtgttaagaaactctcagtttgtgtttctgagaaaggaagagaggatggtgatgcaccggttacaaaagatgagaccacctgcatttcacaagacacaagagctttatcggagaaatccctgcaaagatcagcaaaggtggtttacatcttggagaaaaaacattctcgagcagcaaccggcttcctcaaactcttggctgataagaacagcgaactgtttaggaaatacgccctgttttctccctcagaccaccgagtgcctagaatttatgtgcctctcaaggactgtccccaggactttgtggcacggcctaaagattatgccaacacactgttcatctgccgcattgtggactggaaggaggactgcaattttgccctggggcagctggctaagagtcttgggcaggctggtgaaattgagcctgaaacagaaggaatactaacagagtatggcgtggatttctctgatttctcttcagaagttctagaatgtcttcctcaaggcctgccatggacaattccaccagaggagttcagcaagagaagggatttaagaaaagactgtatcttcaccattgacccatcaaccgcccgagacctcgatgatgccctctcctgcaagccactcgctgacggcaacttcaaagtgggagttcacattgctgacgtgagttactttgttccggagggatctgatctggataaagtggctgccgagagggctacaagcgtctacttggttcaaaaggtggtccccatgcttcccaggctgctgtgtgaggagctgtgcagcctcaaccccatgtccgacaagctgaccttctctgtgatctggacactgactccagagggcaagatccttgatgaatggtttggccggaccatcatccgctcctgcaccaaacttagctacgagcatgcacagagcatgattgaaagcccaactgagaaaatccctgcgaaagagctgccccccatttccccagagcatagcagcgaggaggtacaccaggccgtcttgaatctccacggaattgccaagcagttacgccagcagcgctttgtggacggcgcacttcgtttggatcagctaaagcttgctttcactctggaccacgagaccggattgcctcaaggatgtcatatctatgagtaccgcgagagcaacaagctcgtggaggagttcatgctcttggccaacatggcagtggcccacaagatccaccgcgccttccccgagcaggccctgctgcgccggcaccccccgccccaaacaaggatgctcagtgacctggtggaattctgcgaccagatggggctgcccgtggacttcagctccgcaggagccctcaataaaagcctgacccaaacatttggagatgacaagtactcactggcccgcaaggaggtgctcaccaacatgtgctcccggcccatgcagatggcactgtacttctgctcggggctgctgcaggacccagcgcagttccggcactacgcgctcaatgtgcccctgtacacacacttcacctcgcccatccgccgctttgccgacgtcctggtgcaccgcctcctggctgccgcgttaggctatagggagcgactagacatggcgcccgataccctgcagaaacaggcggaccactgtaacgaccgccgcatggcgtccaagcgcgtgcaggagctcagtaccagtctcttctttgctgttctggtcaaggagagtggccccctggagtcagaagccatggtgatgggcatcctgaagcaagccttcgacgtgctggtgctgcgctacggcgtgcagaagcgcatctactgcaacgcactggccctgcggtcccaccacttccagaaggtgggcaagaagccggaactcacgctggtctgggagcctgaggacatggagcaggagccagcacagcaggtcatcaccatcttcagcctggtggaggtggtcctgcaggcagagtccacagccctcaagtacagcgccatcctgaagcggccaggcacccagggccacctgggccctgagaaggaggaggaggagtctgacggtgagcccgaggactcaagcaccagctga

SEQ ID NO: 662 - DNA, 972 bp, Homo Sapiens
atggccgctgcgcgcccagaggcccagagtcggagctcaccgactccggagtcgcgatcccaggagccactggacctggtcctggtgcctgatgactgccggcctggcacacccccgagtgacctcatcgagatccaggtggtgaaggtgacggacaccacgctggtccctgagcccccggagccaggttctttccactgtgccttgtgccctgctgccttccggctggtttccgagctgctgttccacgaacatggccacttggctggggccgagggaggcgggcagggtggggacccgagccggtgccacgtgtgcggccacagctgcccgggccccgccagcctgcgcgcgcactacagcttgcacacgggggagcggccctaccgctgcgcgctctgcccccgcgccttcaaggccttggcgcccctgctccggcaccagcaccggcacggggtggagccgggcacctctcggaggcctccggacacagcggccgttgcagaacagaggcccggggtggccccggagagggcggaggtggtgatggcggcggcggcggcgggcgcagcggtggggaagccttttgcctgcaggttctgcgccaagcccttccgccgctcctcagacatgcgagaccacgagcgcgtgcacactggcgagcggccataccattgcggcatctgcggcaagggcttcacccagtcctcggtgcttagcggccacgcccgcatccacactggcgagcgcccgttccgctgcacgctctgcgaccgcaccttcaacaactcctccaacttccgcaagcaccagcgcacccacttccacgggccggggccggggctgggagactctggaggccagctgggctcgtcggcggctgaggggtcggggagcgggtgtggggtaggggaccctgcggaggaggggcggggggagaccgcgaaggtgaaggtggaggccgaccagtag

SEQ ID NO: 663 - DNA, 969 bp, Homo Sapiens
atgaagcggcctgggccctgtgactcctccagggattccacatcccaggtgctgcgggacctgcgggggcgagaaagctgggccggtgacaggagggcgcaacccaccccatcccccagggaaagggcttctcccagttccccaccctcccagcccccgcccggcccattacctcttcttcttgtctctcttgtccaagccagggtccctgagcatgagaatgagctccactctggggactatgcccctccaggcagctctgtggagatcgccaagatcttccaggcagacgtcgtacccaggctccaggaaggcgctgtcattgtgctcggctccacagcccacgccgtcctcgctgctcctccttattcaattattaaaactagtgagactgaaaacccctgcatccttgagctcatggacgatgtgctctatgaggcagtagaggagctccgcctgagacttattaaatttggagaaaccaaatttaacgtcactgaacccaaagaacccggagagtcagtggttataagaattccagtgattcaccaaggagacacttccaaggtttccatcagacaggaggcgctatgcagcgacggcggcagagaaagcgtgggagcgacgctcttgctctggacgccgacgtgcccacgtcgaggccgcgcccagacccggaggcggggccgtcacgtggggcagcgtgggccgctgccttggaaacgcagagcgcgcgctccaggtaaaggctgctacgcccaggacagggttctcacggtggaggaaaggacttctgcgggataccacgctgtgcgccaaaaagccgggcggcttcggagccagagcagcggctctgcggcgcaggcggcgggtcggggcagccttgaagccgggatccggcccgaaggggtctttttggagttcctgagctcagtgccccagaaggcacatacttcatatgaaatatga

SEQ ID NO: 664 - DNA, 972 bp, Homo Sapiens
atggattcgaaataccagtgtgtgaagctgaatgatggtcacttcatgcctgtcctgggatttggcacctatgcgcctgcagaggttcctaaaagtaaagctctagaggccgtcaaattggcaatagaagccgggttccaccatattgattctgcacatgtttacaataatgaggagcaggttggactggccatccgaagcaagattgcagatggcagtgtgaagagagaagacatattctacacttcaaagctttggagcaattcccatcgaccagagttggtccgaccagccttggaaaggtcactgaaaaatcttcaattggactatgttgacctctatcttattcattttccagtgtctgtaaagccaggtgaggaagtgatcccaaaagatgaaaatggaaaaatactatttgacacagtggatctctgtgccacatgggaggccatggagaagtgtaaagatgcaggattggccaagtccatcggggtgtccaacttcaaccacaggctgctggagatgatcctcaacaagccagggctcaagtacaagcctgtctgcaaccaggtggaatgtcatccttacttcaaccagagaaaactgctggatttctgcaagtcaaaagacattgttctggttgcctatagtgctctgggatcccatcgagaagaaccatgggtggacccgaactccccggtgctcttggaggacccagtcctttgtgccttggcaaaaaagcacaagcgaaccccagccctgattgccctgcgctaccagctgcagcgtggggttgtggtcctggccaagagctacaatgagcagcgcatcagacagaacgtgcaggtgtttgaattccagttgacttcagaggagatgaaagccatagatggcctaaacagaaatgtgcgatatttgacccttgatatttttgctggcccccctaattatccattttctgatgaatattaa

SEQ ID NO: 665 - DNA, 3813 bp, Homo Sapiens
atgggtgacgttaaaaattttctgtatgcctggtgtggcaaaaggaagatgaccccatcctatgaaattagagcagtggggaacaaaaacaggcagaaattcatgtgtgaggttcaggtggaaggttataattacactggcatgggaaattccaccaataaaaaagatgcacaaagcaatgctgccagagactttgttaactatttggttcgaataaatgaaataaagagtgaagaagttccagcttttggggtagcatctccgcccccacttactgatactcctgacactacagcaaatgctgaaggagatttaccaacaaccatgggaggacctcttcctccacatctggctctcaaagcagaaaataattctgaggtaggggcctctggctatggtgttcctgggcccacctgggaccgaggagccaacttgaaggattactactcaagaaaggaagaacaagaagtgcaagcgactctagaatcagaagaagtggatttaaatgctgggcttcatggaaactggaccttggaaaatgctaaagctcgtctaaaccaatattttcagaaagaaaagatccaaggagaatataagtacacccaagtgggtcctgatcacaacaggagctttattgcagaaatgaccatttatatcaagcagctgggcagaaggatttttgcacgagaacatggatcaaataagaaattggcagcacagtcctgtgccctgtcacttgtcagacaactgtaccatcttggagtggttgaagcttactccggacttacaaagaagaaggaaggagagacagtggagccttacaaagtaaacctctctcaagatttagagcatcagctgcaaaacatcattcaagagctaaatcttgagattttgcccccgcctgaagatccttctgtgccagttgcactcaacattggcaaattggctcagttcgaaccatctcagcgacaaaaccaagtgggtgtggttccttggtcacctccacaatccaactggaatccttggactagtagcaacattgatgaggggcctctggcttttgctactccagagcaaataagcatggacctcaagaatgaattgatgtaccagttggaacaggatcatgatttgcaagcaatcttgcaggagagagagttactgcctgtgaagaaatttgaaagtgagattctggaagcaatcagccaaaattcagttgtcattattagaggggctactggatgtgggaaaaccacacaggttccccagttcattctagatgactttatccagaatgaccgagcagcagagtgtaacatcgtagtaactcagcccagaagaatcagtgcggtttctgtggcagagcgagttgcatttgaaagaggagaagagcctggaaaaagctgtggctacagcgttcgatttgagtctatacttcctcgtcctcatgccagtataatgttttgtactgtaggtgtgctcctgagaaaattagaagcaggcattcgaggaatcagtcatgtaattgtagatgaaatacatgaaagagatattaatactgacttccttttggtagtactgcgtgatgttgttcaggcttatcctgaagttcgcattgttcttatgtctgctactattgataccagcatgttttgtgaatatttcttcaattgccccatcattgaagtttatgggaggacttacccagttcaagaatattttctggaagactgcattcagatgacccactttgttcctccaccaaaagacaaaaagaagaaggataaggatgatgatggtggtgaggatgatgatgcaaattgcaacttgatctgtggtgatgaatatggtccagaaacaaggttgagcatgtctcaattgaacgaaaaggaaactccttttgaactcatcgaggctctacttaagtacattgaaacccttaatgttcctggagctgtgttggtttttttgcctggctggaatctgatttatactatgcagaagcatttggaaatgaatccacattttggaagccatcggtatcagattctacccctgcattctcagattcctcgagaggaacagcgcaaagtgtttgatccagtaccagttggagtaaccaaggttattttgtccacaaatattgctgaaacaagcattaccataaacgatgttgtttatgtcattgactcctgcaagcagaaagtgaaactcttcactgctcacaacaatatgaccaactatgctaccgtatgggcatcaaaaacaaaccttgagcaacggaaagggcgagctggccgagtacggcctggattctgctttcacctgtgcagccgagctcgttttgagagacttgaaacccacatgacaccagagatgttccgaacaccattgcatgaaattgctcttagcataaaacttctgcgtctaggaggaattggccaatttctggccaaagcaattgaacctccccctttggatgctgtgattgaagcagaacacactcttagagagcttgatgcattagatgccaatgatgagttgactcctttgggacgaatcctggctaaactccccattgagcctcgttttggcaaaatgatgataatggggtgtattttctacgtgggagatgctatctgtaccattgctgctgctacctgctttccagagcctttcatcaatgaaggaaagcggctgggctatatccatcgaaattttgctggaaacagattttctgatcacgtagcccttttatcagtattccaagcctgggatgatgctagaatgggtggagaagaagcagagatacgtttttgtgagcacaaaagacttaatatggctacactaagaatgacctgggaagccaaagttcagctcaaagagattttgattaattctgggtttccagaagattgtttgttgacacaagtgtttactaacactggaccagataataatttggatgttgttatctccctcctggcctttggtgtgtaccccaatgtatgctatcataaggaaaagaggaagattctcaccactgaagggcgtaatgcacttatccacaaatcatctgttaattgtccttttagtagccaagacatgaagtacccatctcccttctttgtatttggtgaaaagattcgaactcgagccatctctgctaaaggcatgactttagtcacccccctgcagttgcttctctttgcctccaagaaagtccaatctgatgggcagattgtgcttgtagatgactggattaaactgcaaatatctcatgaagctgctgcctgtatcactggtctccgggcagccatggaggctttggttgttgaagtaaccaaacaacctgctatcatcagccagttggaccccgtaaatgaacgtatgctgaacatgatccgtcagatctctagaccctcagctgctggtatcaaccttatgattggcagtacacggtatggagatggtccacgtcctcccaagatggcccgatacgacaatggaagcggatatagaaggggaggttctagttacagtggtggaggctatggcggtggctatagcagtggaggctatggtagcggaggctatggtggcagcgccaactcctttcgggcaggatatggtgcaggtgttggtggaggctatagaggagtttcccgaggtggctttagaggcaactctggaggagactacagagggcctagtggaggctacagaggatctgggggattccagcgaggaggtggtaggggggcctatggaactggctactttggacagggaagaggaggtggcggctattaa

SEQ ID NO: 666 - DNA, 669 bp, Homo Sapiens
atggcagagaagcccaagctccactacttcaatgcacggggcagaatggagtccacccggtggctcctggctgcagctggagtagagtttgaagagaaatttataaaatctgcagaagatttggacaagttaagaaatgatggatatttgatgttccagcaagtgccaatggttgagattgatgggatgaagctggtgcagaccagagccattctcaactacattgccagcaaatacaacctctatgggaaagacataaaggagagagccctgattgatatgtatatagaaggtatagcagatttgggtgaaatgatcctccttctgcccgtatgtccacctgaggaaaaagatgccaagcttgccttgatcaaagagaaaataaaaaatcgctacttccctgcctttgaaaaagtcttaaagagccatggacaagactaccttgttggcaacaagctgagccgggctgacattcatctggtggaacttctctactacgtcgaggagcttgactccagtcttatctccagcttccctctgctgaaggccctgaaaaccagaatcagcaacctgcccacagtgaagaagtttctacagcctggcagcccaaggaagcctcccatggatgagaaatctttagaagaagcaaggaagattttcaggttttaa

SEQ ID NO: 667 - DNA, 585 bp, Homo Sapiens
atggcggcctcattggtggggaagaagatcgtgtttgtaacggggaacgccaagaagctggaggaggtcgttcagattctaggagataagtttccatgcactttggtggcacagaaaattgacctgccggagtaccagggggagccggatgagatttccatacagaaatgtcaggaggcagttcgccaggtacaggggcccgtgctggttgaggacacttgtctgtgcttcaatgcccttggagggctccccggcccctacataaagtggtttctggagaagttaaagcctgaaggtctccaccagctcctggccgggttcgaggacaagtcagcctatgcgctctgcacgtttgcactcagcaccggggacccaagccagcccgtgcgcctgttcaggggccggacctcgggccggatcgtggcacccagaggctgccaggactttggctgggacccctgctttcagcctgatggatatgagcagacgtacgcagagatgcctaaggcggagaagaacgctgtctcccatcgcttccgggccctgctggagctgcaggagtactttggcagtttggcagcttga

SEQ ID NO: 668 - DNA, 828 bp, Homo Sapiens
atgccgtacgccaaccagcctaccgtgcggatcacggagctcactgacgagaatgtcaagttcatcatcgagaacaccgacctggcggtggccaattcgattcggagggtcttcatcgctgaggttcccataatagccattgactgggttcagattgatgccaattcctcagttcttcatgatgaattcattgctcacaggcttggattaattcccctcattagtgatgacattgtggacaagctgcagtactctcgggactgcacatgtgaggagttctgccccgagtgctcggtggagttcaccctcgatgtgcggtgcaatgaagaccagacgcgacatgtcacgtctcgagacctcatctccaacagcccccgggtcattccggtgacatcccggaaccgagataatgaccccaatgactacgtggagcaggatgacatcctcatcgtcaagttgagaaagggccaggagctgagacttcgagcctatgccaaaaagggctttggcaaggagcatgccaagtggaaccctactgcaggggtggcttttgaatacgatccagacaatgccctgaggcacacagtgtaccccaagcccgaggaatggccaaagagtgagtactcggagctggatgaggatgagtcgcaggctccctatgaccccaacggcaagccagaaaggttttactacaatgtggagtcctgtggctctctgcgtcctgaaaccattgtcctgtcagccctctcaggattgaagaagaaactgagtgatttacaaactcaattaagccacgagatccagagtgatgtgctaaccataaattaa

SEQ ID NO: 669 - DNA, 3693 bp, Homo Sapiens
atgtcggcactttgctggggccgcggagcggcggggctcaaacgagccctacggccttgcggccgcccgggactccccggcaaagaagggaccgccggtggcgtctgcggccccaggaggagctcgtccgccagcccccaggagcaagaccaagaccgcaggaaggactggggccacgtggagctgctggaggtgctccaggcgcgggtgcggcagctgcaggctgagagcgtgtcggaggtggtggtgaacagggtggatgtggcgcggctcccagaatgtggcagtggagatggtagcctccagccacccaggaaggtccagatgggggccaaggatgccaccccggtgccctgtggccgctgggcaaagatactggagaaggataagcggacccagcagatgcgtatgcagcggttgaaggcgaagctgcagatgccattccagagcggggagttcaaggcgctgaccaggcgcctgcaggtggagccccggctcctgagcaagcagatggccgggtgcctggaggactgcacgcgccaggcccccgagagcccctgggaggagcagctggcccggctgctgcaggaggcccctgggaagctgagcctcgatgtggagcaggccccgtcggggcagcactcgcaggcccagctctcaggtcagcagcagaggctcctggccttcttcaagtgctgcctgctcactgaccagctgcccctcgcccaccacctgctggtcgtccaccacggccagcggcagaagcggaagctgctcacgctggacatgtacaacgccgtgatgcttggctgggcgcggcagggtgccttcaaggagctggtatatgtgttattcatggtgaaggatgccggcttgactccggacctgctgtcctatgcggctgccctccagtgcatggggaggcaggaccaggacgccgggaccatcgaaaggtgtctggaacagatgagccaggaggggctgaagctgcaggcactcttcaccgccgttctgctgtctgaggaggatcgggccactgttctgaaggccgtgcacaaggtgaagcccaccttcagcctcccgccgcagctgccgcccccggtcaacacctccaagctgctcagggacgtgtatgccaaggatgggcgtgtgtcctacccgaagctgcacctgcccttgaagaccctgcagtgcctctttgagaagcagctccacatggagctggccagcagggtgtgcgtggtgtccgtggagaagcccacgttgccaagcaaggaggtcaagcacgcgcggaagaccctgaagaccctgcgggaccaatgggagaaagcactgtgccgggcgctgcgggagaccaagaaccgcctagagcgcgaggtgtacgagggccggttctcactttaccccttcctgtgcctgctggacgagcgcgaggtggtgcggatgctcctgcaggtcctgcaggcgctgcccgcccaaggtgagtccttcaccaccctggcccgggagctgagtgcgcgcactttcagccggcacgtggtgcagaggcagcgggtcagtggccaggtgcaggcgctgcagaaccactacaggaagtacctctgcttgctggcctccgacgccgaggtgcccgagccctgcctgccgcggcagtactgggaggagctgggggcgcccgaggccctgcgggagcagccctggcccctgccagtgcagatggagctgggcaagctgctggcggagatgctggtgcaggctacgcagatgccatgcagcctggacaagccgcatcgttcctctcggcttgtccccgtgctctaccacgtgtattccttccgcaacgtccagcagatcggcatcctgaagccgcacccggcctacgtgcagctgctggagaaggccgcggagcccacgctgaccttcgaggcggtggatgtacccatgctttgccccccgctgccctggacatcgccgcactctggtgctttcctgctcagccccaccaagctgatgcgcacggtggaaggcgccacgcagcaccaggagctgctggaaacctgcccgcccaccgcgctgcatggcgcactggacgccctcacccaactgggcaactgcgcctggcgcgtcaacgggcgcgtgctggacctggtgctgcagctcttccaggccaagggctgcccccagctaggcgtgccggccccgccctccgaggcgccccagccgcccgaggcccacctgccgcacagcgccgcgcccgcccgcaaggccgagctgcgccgtgagctggcgcactgccagaaggtggcccgggagatgcacagcctgcgggcggaggcgctgtaccgcctctcgctggcgcagcacctgcgggaccgcgtcttctggctgccgcacaacatggacttccgcggccgcacctacccctgcccgccgcacttcaaccacctgggcagcgacgtggcgcgggccctgctggagttcgcccagggccgcccgctcggcccgcacggcctggattggctcaagatccacctggtcaatctcacggggttgaagaagcgggagccgctgcggaagcgcctggcctttgcggaggaggtgatggatgacatcctggactccgcggaccaacccttgacgggccgaaagtggtggatgggcgcggaggaaccctggcagacgctggcctgctgtatggaggtggcgaacgctgtgcgcgcctccgaccctgccgcctatgtctcccacctccccgtccatcaggacggctcttgcaacggcctgcagcattatgctgctctgggccgcgacagcgtgggcgccgcctccgtcaacctggagccctcggatgtgccgcaggacgtgtacagcggcgtggccgcgcaggtggaggtgttccgtaggcaggacgcccagcggggcatgcgggtggcacaggtgctggaaggtttcatcacccgcaaggtggtgaagcagacggtgatgacggtggtgtacggggtcacgcgctatggcgggcgcctgcagattgagaagcgcctccgggagctgagcgactttccccaggagttcgtgtgggaggcctctcactatctcgtacgccaggtcttcaagagtctacaggagatgttctcggggacccgggccatccagcactggctgaccgagagtgcccgcctcatctcccacatgggctctgtggtggagtgggtcacacccctgggcgtccccgtcatccagccctatcgcctggactccaaggtcaagcaaataggaggtggaattcagagcatcacctacacccacaacggagacatcagccgaaagcccaacacacgtaagcagaagaacggcttcccgcccaacttcatccactcgctggactcctcccacatgatgctcaccgccctgcactgctacaggaagggcctgaccttcgtctctgtgcacgactgttactggactcacgcagctgatgtctccgtcatgaaccaggtgtgccgggagcagtttgtccgcttgcacagcgagcccatcctgcaggacctgtccagattcctggtcaagcggttctgctctgagccccagaagatcttggaggccagccagctgaaggagacactgcaggcggtgcccaagccaggggccttcgacctggagcaggtgaagcgttccacctacttcttcagctga

SEQ ID NO: 670 - DNA, 1386 bp, Homo Sapiens
atgagcctggacatccagagcctggacatccagtgtgaggagctgagcgacgctagatgggccgagctcctccctctgctccagcagtgccaagtggtcaggctggacgactgtggcctcacggaagcacggtgcaaggacatcagctctgcacttcgagtcaaccctgcactggcagagctcaacctgcgcagcaacgagctgggcgatgtcggcgtgcattgcgtgctccagggcctgcagaccccctcctgcaagatccagaagctgagcctccagaactgctgcctgacgggggccggctgcggggtcctgtccagcacactacgcaccctgcccaccctgcaggagctgcacctcagcgacaacctcttgggggatgcgggcctgcagctgctctgcgaaggactcctggacccccagtgccgcctggaaaagctgcagctggagtattgcagcctctcggctgccagctgcgagcccctggcctccgtgctcagggccaagccggacttcaaggagctcacggttagcaacaacgacatcaatgaggctggcgtccgtgtgctgtgccagggcctgaaggactccccctgccagctggaggcgctcaagctggagagctgcggtgtgacatcagacaactgccgggacctgtgcggcattgtggcctccaaggcctcgctgcgggagctggccctgggcagcaacaagctgggtgatgtgggcatggcggagctgtgcccagggctgctccaccccagctccaggctcaggaccctgtggatctgggagtgtggcatcactgccaagggctgcggggatctgtgccgtgtcctcagggccaaggagagcctgaaggagctcagcctggccggcaacgagctgggggatgagggtgcccgactgctgtgtgagaccctgctggaacctggctgccagctggagtcgctgtgggtgaagtcctgcagcttcacagccgcctgctgctcccacttcagctcagtgctggcccagaacaggtttctcctggagctacagataagcaacaacaggctggaggatgcgggcgtgcgggagctgtgccagggcctgggccagcctggctctgtgctgcgggtgctctggttggccgactgcgatgtgagtgacagcagctgcagcagcctcgccgcaaccctgttggccaaccacagcctgcgtgagctggacctcagcaacaactgcctgggggacgccggcatcctgcagctggtggagagcgtccggcagccgggctgcctcctggagcagctggtcctgtacgacatttactggtctgaggagatggaggaccggctgcaggccctggagaaggacaagccatccctgagggtcatctcctga

SEQ ID NO: 671 - DNA, 2379 bp, Homo Sapiens
atgcatgtgatcaagcgagatggccgccaagaacgagtcatgtttgacaaaattacatctcgaatccagaagctttgttatggactcaatatggattttgttgatcctgctcagatcaccatgaaagtaatccaaggcttgtacagtggggtcaccacagtggaactagatactttggctgctgaaacagctgcaaccttgactactaagcaccctgactatgctatcctggcagccaggatcgctgtctctaacttgcacaaagaaacaaagaaagtgttcagtgatgtgatggaagacctctataactacataaatccacataatggcaaacactctcccatggtggccaagtcaacattggatattgttctggccaataaagatcgcctgaattctgctattatctatgaccgagatttctcttacaattacttcggctttaagacgctagagcggtcttatttgttgaagatcaatggaaaagtggctgaaagaccacaacatatgttgatgagagtatctgttgggatccacaaagaagacattgatgcagcaattgaaacatataatcttctttctgagaggtggtttactcatgcttcgcccactctcttcaatgctggtaccaaccgcccacaactttctagctgttttcttctgagtatgaaagatgacagcattgaaggcatttatgacactctaaagcaatgtgcattgatttctaagtctgctggaggaattggtgttgctgtgagttgtattcgggctactggcagctacattgctgggactaatggcaattccaatggccttgtaccgatgctgagagtatataacaacacagctcgatatgtggatcaaggtgggaacaagcgtcctggggcatttgctatttacctggagccttggcatttagacatctttgaattccttgatttaaagaagaacacaggaaaggaagagcagcgtgccagagatcttttctttgctctttggattccggatctcttcatgaaacgagtggagactaatcaggactggtctttgatgtgtccaaatgagtgtcctggtctggatgaggtttggggagaggaatttgagaaactatatgcaagttatgagaaacaaggtcgtgtccgcaaagttgtaaaagctcagcagctttggtatgccatcattgagtctcagacggaaacaggcaccccgtatatgctctacaaagattcctgtaatcgaaagagcaaccagcagaacctgggaaccatcaaatgcagcaacctgtgcacagaaatagtggagtacaccagcaaagatgaggttgctgtttgtaatttggcttccctggccctgaatatgtatgtcacatcagaacacacatacgactttaagaagttggctgaagtcactaaagtcgttgtccgaaacttgaataaaattattgatataaactactatcctgtaccagaggcatgcctatcaaataaacgccatcgccccattggaattggggtacaaggtctggcagatgcttttatcctgatgagatacccttttgagagtgcagaagcccagttactgaataagcagatctttgaaactatttattatggtgctctggaagccagctgtgaccttgccaaggagcagggcccatacgaaacctatgagggctctccagttagcaaaggaattcttcagtatgatatgtggaatgttactcctacagacctatgggactggaaggttctcaaggagaagattgcaaagtatggtataagaaacagtttacttattgccccgatgcctacagcttccactgctcagatcctggggaataatgagtccattgaaccttacaccagcaacatctatactcgcagagtcttgtcaggagaatttcagattgtaaatcctcacttattgaaagatcttaccgagcggggcctatggcatgaagagatgaaaaaccagattattgcatgcaatggctctattcagagcataccagaaattcctgatgacctgaagcaactttataaaactgtgtgggaaatctctcagaaaactgttctcaagatggcagctgagagaggtgctttcattgatcaaagccaatctttgaacatccacattgctgagcctaactatggcaaactcactagtatgcacttctacggctggaagcagggtttgaagactgggatgtattatttaaggacaagaccagcggctaatccaatccagttcactctaaataaggagaagctaaaagataaagaaaaggtatcaaaagaggaagaagagaaggagaggaacacagcagccatggtgtgctctttggagaatagagatgaatgtctgatgtgtggatcctga

SEQ ID NO: 672 - DNA, 1104 bp, Homo Sapiens
atggaagcgaatgggttgggacctcagggttttccggagctgaagaatgacacattcctgcgagcagcctggggagaggaaacagactacactcccgtttggtgcatgcgccaggcaggccgttacttaccagagtttagggaaacccgggctgcccaggactttttcagcacgtgtcgctctcctgaggcctgctgtgaactgactctgcagccactgcgtcgcttccctctggatgctgccatcattttctccgacatccttgttgtaccccaggcactgggcatggaggtgaccatggtacctggcaaaggacccagcttcccagagccattaagagaagagcaggacctagaacgcctacgggatccagaagtggtagcctctgagctaggctatgtgttccaagccatcacccttacccgacaacgactggctggacgtgtgccgctgattggctttgctggtgccccatggaccctgatgacatacatggttgagggtggtggctcaagcaccatggctcaggccaagcgctggctctatcagagacctcaggctagtcaccagctgcttcgcatcctcactgatgctctggtcccatatctggtaggacaagtggtggctggtgcccaggcattgcagctgtttgagtcccatgcagggcatcttggcccacagctcttcaacaagtttgcactgccttacatccgtgatgtggccaagcaagtgaaggccaggttgcgggaggcaggcctggcaccagtgcccatgatcatctttgctaaggatgggcattttgccctggaggagctggcccaagctggctatgaggtggttgggcttgactggacagtggccccaaagaaagcccgggagtgtgtggggaagacggtgacattgcagggcaacctggacccctgtgccttgtatgcatctgaggaggagatcgggcagttggtgaagcagatgctggatgactttggaccacatcgctacattgccaacctgggccatgggctttatcctgacatggacccagaacatgtgggcgcctttgtggatgctgtgcataaacactcacgtctgcttcgacagaactga

SEQ ID NO: 673 - DNA, 1875 bp, Homo Sapiens
atgcagccagatcccaggcctagcggggctggggcctgctgccgattcctgcccctgcagtcacagtgccctgagggggcaggggacgcggtgatgtacgcctccactgagtgcaaggcggaggtgacgccctcccagcatggcaaccgcaccttcagctacaccctggaggatcataccaagcaggcctttggcatcatgaacgagctgcggctcagccagcagctgtgtgacgtcacactgcaggtcaagtaccaggatgcaccggccgcccagttcatggcccacaaggtggtgctggcctcatccagccctgtcttcaaggccatgttcaccaacgggctgcgggagcagggcatggaggtggtgtccattgagggtatccaccccaaggtcatggagcgcctcattgaattcgcctacacggcctccatctccatgggcgagaagtgtgtcctccacgtcatgaacggtgctgtcatgtaccagatcgacagcgttgtccgtgcctgcagtgacttcctggtgcagcagctggaccccagcaatgccatcggcatcgccaacttcgctgagcagattggctgtgtggagttgcaccagcgtgcccgggagtacatctacatgcattttggggaggtggccaagcaagaggagttcttcaacctgtcccactgccaactggtgaccctcatcagccgggacgacctgaacgtgcgctgcgagtccgaggtcttccacgcctgcatcaactgggtcaagtacgactgcgaacagcgacggttctacgtccaggcgctgctgcgggccgtgcgctgccactcgttgacgccgaacttcctgcagatgcagctgcagaagtgcgagatcctgcagtccgactcccgctgcaaggactacctggtcaagatcttcgaggagctcaccctgcacaagcccacgcaggtgatgccctgccgggcgcccaaggtgggccgcctgatctacaccgcgggcggctacttccgacagtcgctcagctacctggaggcttacaaccccagtgacggcacctggctccggttggcggacctgcaggtgccgcggagcggcctggccggctgcgtggtgggcgggctgttgtacgccgtgggcggcaggaacaactcgcccgacggcaacaccgactccagcgccctggactgttacaaccccatgaccaatcagtggtcgccctgcgcccccatgagcgtgccccgtaaccgcatcggggtgggggtcatcgatggccacatctatgccgtcggcggctcccacggctgcatccaccacaacagtgtggagaggtatgagccagagcgggatgagtggcacttggtggccccaatgctgacacgaaggatcggggtgggcgtggctgtcctcaatcgtctcctttatgccgtggggggctttgacgggacaaaccgccttaattcagctgagtgttactacccagagaggaacgagtggcgaatgatcacagcaatgaacaccatccgaagcggggcaggcgtctgcgtcctgcacaactgtatctatgctgctgggggctatgatggtcaggaccagctgaacagcgtggagcgctacgatgtggaaacagagacgtggactttcgtagcccccatgaagcaccggcgaagtgccctggggatcactgtccaccaggggagaatctacgtccttggaggctatgatggtcacacgttcctggacagtgtggagtgttacgacccagatacagacacctggagcgaggtgacccgaatgacatcgggccggagtggggtgggcgtggctgtcaccatggagccctgccggaagcagattgaccagcagaactgtacctgttga

SEQ ID NO: 674 - DNA, 1209 bp, Homo Sapiens
atgccccactctgctgggggtactgcaggggtggggctggaggctgcagagcccacagccctgctcaccagggcagagcccccttcagaacccacagagatccgtccacaaaagcggaaaaaggggccagcccccaaaatgctggggaacgagctatgcagcgtgtgtggggacaaggcctcgggcttccactacaatgttctgagctgcgagggctgcaagggattcttccgccgcagcgtcatcaagggagcgcactacatctgccacagtggcggccactgccccatggacacctacatgcgtcgcaagtgccaggagtgtcggcttcgcaaatgccgtcaggctggcatgcgggaggagtgtgtcctgtcagaagaacagatccgcctgaagaaactgaagcggcaagaggaggaacaggctcatgccacatccttgccccccagggcttcctcacccccccaaatcctgccccagctcagcccggaacaactgggcatgatcgagaagctcgtcgctgcccagcaacagtgtaaccggcgctccttttctgaccggcttcgagtcacgccttggcccatggcaccagatccccatagccgggaggcccgtcagcagcgctttgcccacttcactgagctggccatcgtctctgtgcaggagatagttgactttgctaaacagctacccggcttcctgcagctcagccgggaggaccagattgccctgctgaagacctctgcgatcgaggtgatgcttctggagacatctcggaggtacaaccctgggagtgagagtatcaccttcctcaaggatttcagttataaccgggaagactttgccaaagcagggctgcaagtggaattcatcaaccccatcttcgagttctccagggccatgaatgagctgcaactcaatgatgccgagtttgccttgctcattgctatcagcatcttctctgcagaccggcccaacgtgcaggaccagctccaggtagagaggctgcagcacacatatgtggaagccctgcatgcctacgtctccatccaccatccccatgaccgactgatgttcccacggatgctaatgaaactggtgagcctccggaccctgagcagcgtccactcagagcaagtgtttgcactgcgtctgcaggacaaaaagctcccaccgctgctctctgagatctgggatgtgcacgaatga

SEQ ID NO: 675 - DNA, 534 bp, Homo Sapiens
atggaggcgctgattttggaaccttccctgtatactgtcaaagccatcctgattctggacaatgatggagatcgactttttgccaagtactatgacgacacctaccccagtgtcaaggagcaaaaggcctttgagaagaacattttcaacaagacccatcggactgacagtgaaattgccctcttggaaggcctgacagtggtatacaaaagcagtatagatctctatttctatgtgattggcagctcctatgaaaatgagctgatgcttatggctgttctgaactgtctcttcgactcattgagccagatgctgaggaaaaatgtagaaaagcgagcactgctggagaacatggaggggctgttcttggctgtggatgaaattgtagatggaggggtgatcctagagagtgatccccagcaggtggtacaccgggtggcattaaggggtgaagatgtcccccttacggagcagaccgtgtctcaggtgctgcagtcagccaaagaacagatcaagtggtcactccttcggtga

SEQ ID NO: 676 - DNA, 5529 bp, Homo Sapiens
atggagctgatgtttgcagagtgggaggacggagagcgcttctcattcgaggattcggaccgttttgaggaggattcactctgttccttcatctccgaggccgagagcctctgccagaactggcggggatggcgcaaacagtcagcggggcccaattcccccactggcggcggtggcggaggtggcagtggcggtaccagaatgcgagatggactggtgatcccattggtggagctgtcagcaaagcaggtggcatttcatatcccatttgaagtggtggagaaagtttacccaccagtgcctgagcagctacagctccgaattgctttttggagcttccctgagaatgaagaggacattcggctgtattcgtgcctggccaatggcagtgcggatgagtttcagcgaggggatcagctcttccgcatgcgggctgtgaaggacccattgcagatagggttccacctgagtgctacagtggtgccacctcagatggtccctcctaaaggggcctacaacgtggctgtgatgtttgaccgctgccgggtcacttcctgcagctgtacctgtggggctggggccaaatggtgcacccacgtcgtggcactctgtctcttccgcatccacaacgcttctgcagtctgcctgcgagccccagtctcagagtccctgtcccggctacagagggaccagctgcaaaagtttgctcagtacctcatcagtgagctccctcagcagatcctccccacagctcagcgtctcctggacgaactcctgtcttcccagtcaacagccatcaatacagtgtgtggagctccggaccccacagcagggccctcagcatcggaccagagtacttggtatctggatgaatcgacactcactgacaacatcaaaaagacactgcacaagttctgtggcccctcccctgtggtcttcagtgatgtgaactccatgtatctgtcttccacggagccgccagccgctgctgaatgggcatgtctgctgcgccctctgaggggccgtgagccagagggcgtctggaacctgctaagcattgtgcgggagatgttcaagcggagggacagcaatgctgcccccttgttggaaatcctcactgaccagtgcctcacctatgaacagataacaggttggtggtatagcgtacgtacctcagcctcacacagcagtgccagtgggcacacgggccgtagcaacgggcagtcagaggtggcagcccatgcctgtgccagcatgtgtgacgagatggtcacactgtggaggctggccgtgctggaccctgcactcagcccccagcggcgccgggaactgtgtacgcagctgcggcagtggcaactgaaggtgattgagaacgtcaagcggggccaacacaagaagacgctggagcggctcttccccggcttccggccagcggtggaggcctgctacttcaactgggaagaggcctacccacttcctggtgtcacctacagcggcactgacaggaagctggcactgtgctgggcccgggccctgccctctcggccaggtgcctcccgctctgggggcctggaggaatcccgggaccggccccgaccccttcctactgagccagctgtgcggcccaaggagcctgggaccaagcgaaagggcttgggtgagggggtcccctcatcacagcggggtccccgccgcctctcagctgaagggggagataaagctctacataagatgggtccaggtgggggcaaagccaaggcactgggtggggctggcagtgggagcaagggctcagcaggtggcggaagcaagcgacggctgagcagcgaagacagctccctggagccagacctggccgagatgagcctggatgacagcagcctggccctgggcgcagaggccagcaccttcgggggattccctgagagccctccaccctgtcctctccacggtggctcccgaggcccttccactttccttcctgagcccccagatacttatgaagaagatggtggtgtgtacttctcggaagggcctgagcctcccacagcctctgttggcccccctggcctactgcctggggatgtctgtacccaggacgacctcccttctacagatgagagtggcaatgggcttcccaaaaccaaagaggcagcccctgcagttggagaggaggatgatgactaccaggcgtactatctgaatgcccaggatggggctgggggcgaggaagagaaggccgagggcggggctggggaggagcacgacctgtttgctgggctgaagccactggaacaggagagtcgcatggaggtactgtttgcctgtgctgaggccctgcatgcgcatggctatagcagtgaggcctcccgtctcactgtggagcttgcccaggatctgctagccaacccacccgacctcaaggtagagccgccccctgccaagggcaagaagaacaaggtatccacgagccgtcagacctgggtggctaccaacaccctgagcaaggcggccttcctgttgacagtgctaagtgagcgtccagagcaccacaacctggccttccgagttggcatgtttgccttggagctacagaggcctccagcttctaccaaggccttggaggtgaagctggcataccaggagtctgaggtggctgccctgctcaagaagatccctctgggtccaagtgagatgagtaccatgcggtgccgggcagaggaacttcgggaggggacactctgtgactatcggcctgtgttgcctctcatgctggccagtttcatctttgacgttctctgtgctccagtggtttctcccacaggttcccggcccccaagtcgcaactggaacagcgagacacctggggatgaggagcttggatttgaagcagcagttgctgccttgggcatgaagacaacagtgagcgaggcagaacatcccctcttatgtgaaggcacacgtcgggagaagggtgacctggcattagcactaatgatcacttacaaggacgaccaggccaagcttaagaagatcttagacaaactcttggaccgagagagccagacacataagccacagacgctgagttctttctactcatctagccgcccaaccacagccagccagaggtctccttcaaagcacgggggcccatctgccccaggggccctgcaaccactgacctcaggctctgcagggcctgctcaaccagggagtgtggcaggggctgggccaggccccactgagggcttcacagagaagaatgtgcctgagagttccccacattccccctgtgagggtcttccatctgaggcagctttgaccccaaggccagaagggaaggttcctagccgcttggcacttggcagtcgtggaggctataatggacggggatgggggtccccaggacggcctaagaagaagcacacaggcatggccagcattgacagcagtgcccctgaaacaacatcggatagttcccccaccttaagccggagaccacttcgagggggctgggcccccacctcctggggtcgaggtcaggacagtgacagcattagcagctcttcttcggactccctgggctcctcatcctccagtggaagtcgccgggccagtgccagtggaggagcccgggcgaagactgttgaagttggcaggtacaagggccgccgccccgagagtcatgcccctcatgtacccaatcagccatcagaggcagctgcacacttctacttcgagctggcgaagacagtgctgatcaaggcagggggcaacagcagcacttccattttcacacatccatcttcctcagggggccaccagggtcctcaccgcaacctgcacctttgcgccttcgagattgggctttatgcccttggcctgcacaactttgtttctcccaactggctctcacgtacttattcttcccacgtttcctggattacaggccaggccatggagataggcagcgcagccctgactatactggtagaatgctgggatgggcacctgacaccccctgaggttgcatccctggctgacagggcatcacgggcaagagactccaatatggtgagggcggcagcagagctggccctgagctgcctgcctcacgcccatgcattgaaccctaatgagatccagcgggccctggtgcagtgcaaggaacaggacaacctgatgttggagaaggcctgcatggcagtggaagaggcagctaagggtgggggcgtgtaccctgaagtgttgtttgaggttgctcaccagtggttctggctgtatgagcaaactgcaggtggctcatccacagcccgtgaaggggctacaagctgtagtgccagtgggatcagggcaggtggggaagctgggcggggtatgcctgagggtagagggggcccagggactgagccggttacagtggcagcggcagcagtgacagcagcagccacagtggtgcccgtcatatcggtggggtctagtttatacccgggtccaggactggggcatggccactcccctggcctgcacccctacactgctctacagccccacctgccctgtagccctcagtatctcactcacccagctcaccctgcccaccccatgcctcacatgccccggcctgccgtcttccctgtgcccagctctgcatacccacagggtgtgcatcctgcattcctaggggctcagtacccttattcagtgactcctccctcacttgctgccactgctgtgtctttccccgttccttccatggcacccatcacagtacatccctaccacacagagccagggcttccactgcccaccagtgtggcctgtgagttgtggggccagggaacagtgagcagtgtccatccagcatccacgtttccagccatccaaggtgcctcactgcctgccctgaccacacagcccagccctctggtgagcggaggttttccaccgcccgaggaggagacacacagtcagccagtcaatccccacagcctgcaccacctgcatgctgcctaccgtgtcggaatgctggcactggagatgctgggtcgccgggcacacaacgatcaccccaacaacttctcccgctcccccccctacactgatgatgtcaaatggttgctggggctggcagcaaagctgggagtgaactacgtgcaccagttctgtgtgggggcagccaagggggtgctgagcccgtttgtgctgcaggagatcgtcatggagacgctgcagcggctgagtcccgctcatgcccacaaccacctgcgtgccccggccttccaccaactggtgcagcgctgccagcaggcatacatgcagtacatccaccaccgcttgattcacctgactcctgcggactacgacgactttgtgaatgcgatccggagtgcccgcagcgccttctgcctgacgcccatgggcatgatgcagttcaacgacatcctacagaacctcaagcgcagcaaacagaccaaggagctgtggcagcgggtctcactcgagatggccaccttctccccctga

SEQ ID NO: 677 - DNA, 1419 bp, Homo Sapiens
atggcggggcccggctggggtcccccgcgcctggacggcttcatcctcaccgagcgcctgggcagcggcacgtacgccacggtgtacaaggcctacgccaagaaggacactcgtgaagtggtagccataaagtgtgtagccaagaaaagtctgaacaaggcatcggtggagaacctcctcacggagattgagatcctcaagggcattcgacatccccacattgtgcagctgaaagactttcagtgggacagtgacaatatctacctcatcatggagttttgcgcagggggcgacctgtctcgcttcatccatacccgcaggattctgcctgagaaggtggcgcgtgtcttcatgcagcaattagctagcgccctgcaattcctgcatgaacggaatatctctcacctggatctgaagccacagaacattctactgagctccttggagaagccccacctaaaactggcagactttggtttcgcacaacacatgtccccgtgggatgagaagcacgtgctccgtggctcccccctctacatggcccccgagatggtgtgccagcggcagtatgacgcccgcgtggacctctggtccatgggggtcatcctgtatgaagccctcttcgggcagcccccctttgcctccaggtcgttctcggagctggaagagaagatccgtagcaaccgggtcatcgagctccccttgcggcccctgctctcccgagactgccgggacctactgcagcggctcctggagcgggaccccagccgtcgcatctccttccaggacttttttgcgcacccctgggtggacctggagcacatgcccagtggggagagtctggggcgagcaaccgccctggtggtgcaggctgtgaagaaagaccaggagggggattcagcagctgccttatcactctactgcaaggctctggacttctttgtacctgccctgcactatgaagtggatgcccagcggaaggaggcaattaaggcaaaggtggggcagtacgtgtcccgggctgaggagctcaaggccatcgtctcctcttccaatcaggccctgctgaggcaggggacctctgcccgagacctgctcagagagatggcccgggacaagccacgcctcctagctgccctggaagtggcttcagctgccatggccaaggaggaggccgccggcggggagcaggatgccctggacctgtaccagcacagcctgggggagctactgctgttgctggcagcggagcccccgggccggaggcgggagctgcttcacactgaggttcagaacctcatggcccgagctgaatacttgaaggagcaggtcaagatgagggaatctcgctgggaagctgacaccctggacaaagagggactgtcggaatctgttcgtagctcttgcacccttcagtga

SEQ ID NO: 678 - DNA, 720 bp, Homo Sapiens
atgcccaaatccaagcgcgacaagaaagtctccttaaccaaaactgccaagaaaggcttggaattgaaacaaaacctgatagaagagcttcggaaatgtgtggacacctacaagtaccttttcatcttctctgtggccaacatgaggaacagcaagctgaaggacatccggaacgcctggaagcacagccggatgttctttggcaaaaacaaggtgatgatggtggccttgggtcggagcccatctgatgaatacaaagacaacctgcaccaggtcagcaaaaggttgaggggtgaggtgggtctcctgttcaccaaccgcacaaaggaggaggtgaatgagtggttcacgaaatacacagaaatggactacgcccgagctggtaacaaagcagctttcactgtgagcctggatccagggcccctggagcagttcccccactccatggagccacagctcaggcagctgggcctgcccaccgccctcaagagaggtgtggtgactctgctgtctgactacgaggtgtgcaaggagggcgatgtgctgaccccagagcaggctcgcgtcctgaagctttttgggtatgagatggctgaattcaaggtgaccatcaaatacatgtgggattcacagtcgggaaggttccagcagatgggagacgacttgccagagagcgcatctgagtccacagaagagtcagactcagaagatgatgactga

SEQ ID NO: 679 - DNA, 1740 bp, Homo Sapiens
atgtcggccagcagcctcttggagcagagaccaaaaggtcaaggaaacaaagtacaaaatggatctgtacatcaaaaggatggattaaacgatgatgattttgaaccttacttgagtccacaggcaaggcccaataatgcatatactgccatgtcagattcctacttacccagttactacagtccctccattggcttctcctattctttgggtgaagctgcttggtctacggggggtgacacagccatgccctacttaacttcttatggacagctgagcaacggagagccccacttcctaccagatgcaatgtttgggcaaccaggagccctaggtagcactccatttcttggtcagcatggttttaatttctttcccagtgggattgacttctcagcatggggaaataacagttctcagggacagtctactcagagctctggatatagtagcaattatgcttatgcacctagctccttaggtggagccatgattgatggacagtcagcttttgccaatgagaccctcaataaggctcctggcatgaatactatagaccaagggatggcagcactgaagttgggtagcacagaagttgcaagcaatgttccaaaagttgtaggttctgctgttggtagcgggtccattactagtaacatcgtggcttccaatagtttgcctccagccaccattgctcctccaaaaccagcatcttgggctgatattgctagcaagcctgcaaaacagcaacctaaactgaagaccaagaatggcattgcagggtcaagtcttccgccacccccgataaagcataacatggatattggaacttgggataacaagggtcccgttgcaaaagccccctcacaggctttggttcagaatataggtcagccaacccaggggtctcctcagcctgtaggtcagcaggctaacaatagcccaccagtggctcaggcatcagtagggcaacagacacagccattgcctccacctccaccacagcctgcccagctttcagtccagcaacaggcagctcagccaacccgctgggtagcacctcggaaccgtggcagtgggttcggtcataatggggtggatggtaatggagtaggacagtctcaggctggttctggatctactccttcagaaccccacccagtgttggagaagcttcggtccattaataactataaccccaaagattttgactggaatctgaaacatggccgggttttcatcattaagagctactctgaggacgatattcaccgttccattaagtataatatttggtgcagcacagagcatggtaacaagagactggatgctgcttatcgttccatgaacgggaaaggccccgtttacttacttttcagtgtcaacggcagtggacacttctgtggcgtggcagaaatgaaatctgctgtggactacaacacatgtgcaggtgtgtggtcccaggacaaatggaagggtcgttttgatgtcaggtggatttttgtgaaggacgttcccaatagccaactgcgacacattcgcctagagaacaacgagaataaaccagtgaccaactctagggacactcaggaagtgcctctggaaaaggctaagcaggtgttgaaaattatagccagctacaagcacaccacttccatttttgatgacttctcacactatgagaaacgccaagaggaagaagaaagtgttaaaaaggaacgtcaaggtcgtgggaaataa

SEQ ID NO: 680 - DNA, 639 bp, Homo Sapiens
atggaagcaaagactcttggaactgtaacgcccagaaaacctgtcttatctgtcagtgcaagaaaaattaaggacaatgcggctgattggcacaatttaatcctgaagtgggaaaccctcaatgatgcaggttttaccactgcaaataatattgccaacttgaaaatcagtttattgaataaagacaagatagaactagacagcagcagcccagcctcgaaggaaaatgaagaaaaggtgtgtctggaatataacgaggaactggagaagctgtgtgaggaactgcaggccaccttggatgggttgaccaaaatacaggtgaaaatggaaaagctgtcttcaactaccaagggaatttgtgaactagaaaactaccattatggggaggagagtaaacgaccccctctgttccacacgtggcctacaacccatttctatgaggtttcgcataagctcttggagatgtacaggaaggagctgctcctgaagcgcacggtggccaaggagcttgcccacaccggggatcccgacctcaccctgagctacctgtccatgtggctgcaccagccctatgtggagagcgacagcaggctgcatctggagagcatgctgctggagacaggccaccgagctctctga

SEQ ID NO: 681 - DNA, 540 bp, Homo Sapiens
atgagtggggggcgggctcccgcggtcctgctcggcggagtggcctctctgctcctgtcttttgtttggatgccggcgctgctgcctgtggcctcccgccttttgttgctaccccgagtcttgctgaccatggcctctggaagccctccgacccagccctcgccggcctcggattccggctctggctacgttccgggctcggtctctgcagcctttgttacttgccccaacgagaaggtcgccaaggagatcgccagggccgtggtggagaagcgcctagcagcctgcgtcaacctcatccctcagattacatccatctatgagtggaaagggaagatcgaggaagacagtgaggtgctgatgatgattaaaacccaaagttccttggtcccagctttgacagattttgttcgttctgtgcacccttacgaagtggccgaggtaattgcattgcctgtggaacaggggaactttccgtacctgcagtgggtgcgccaggtcacagagtcagtttctgactctatcacagtcctgccatga

SEQ ID NO: 682 - DNA, 378 bp, Homo Sapiens
atggagtccaaagagaaacgagcagtaaacagtctcagcatggaaaatgccaaccaagaaaatgaagaaaaggagcaagttgctaataaaggggagcccttggccctccctttggatgctggtgaatactgtgtgcctagaggaaatcgtaggcggttccgcgttaggcagcccatcctgcagtatagatgggatatgatgcataggcttggagaaccacaggcaaggatgagagaagagaatatggaaaggattggggaggaggtgagacagctgatggaaaagctgagggaaaagcagttgagtcatagtctgcgggcagtcagcactgacccccctcaccatgaccatcatgatgagttttgccttatgccctga

SEQ ID NO: 683 - DNA, 672 bp, Homo Sapiens
atgctgggagtcaccaccgtccgttctcggatgaggcgggccctggtgtttggcatggttgtgccctcagtcctggttccgtggctcctgctgggtgcctcgtggctcattccccagacctctttcctcagtaatgtctgcgggctgtccatcgggctggcctatggcctcacctactgctattccatcgacctctcagagcgagtggcactgaagctcgatcagaccttccccttcagcctgatgaggaggatatccgtgttcaagtacgtctcagggtcttcagccgagaggagggcagcccagagccggaaactgaacccggtgcctggctcctaccccacacagagctgccaccctcacctgtccccaagccaccctgtgtcccagacgcagcacgccagtggtcagaagctggcctcctggccctcctgcacccccgggcacatgcccaccttgcctccgtaccagcctgcctccggcctgtgctatgtgcagaaccactttggtccaaaccccacctcctccagtgtctacccagcttctgcgggcacctccctgggcatccagccccccacgcctgtgaacagccctggcacggtgtattctggggccttgggcacaccaggggctgcaggctccaaggagtcctccagggtccccatgccctga

SEQ ID NO: 684 - DNA, 2565 bp, Homo Sapiens
atggcgtcggaggggccgcgggagcccgaaagcgagggcatcaagttatcagcagatgtcaaaccatttgtccccagatttgccgggctcaatgtggcatggttagagtcctcagaagcatgtgtcttccccagctctgcagccacatactatccgtttgttcaggaaccaccagtgacagagcagaaaatatatactgaagacatggcctttggagcttcaacttttccacctcagtatttatcttctgagataactcttcatccatatgcctattctccttatacccttgactccacacagaatgtttactcagtgcctggctcccagtatctttataaccaacccagttgttaccgaggttttcaaacagtgaagcatcgaaatgagaacacatgccctctcccacaagaaatgaaagctctgtttaagaagaaaacctatgatgagaaaaaaacgtatgatcagcaaaagtttgacagtgaaagggctgatggaactatatcatctgagataaaatcagctagaggttcacatcatttgtccatttacgctgagaatagtttgaaatcagatggttaccataagcgaacagacaggaaatccagaatcattgcaaaaaatgtatctacctccaaacctgagtttgaatttaccacactggactttcctgaactgcaaggtgcagagaacaatatgtcagagatacagaagcaacccaagtggggacctgtccactctgtctctaccgacatttctcttctaagagaagtagtaaaaccagctgcagtgttatcaaagggtgaaatagtggtgaaaaataacccaaatgaatctgtaactgctaatgccgctaccaattctccttcatgtacaagagagttatcttggacaccaatgggttatgttgttcgacagacattatctacagaactgtcagcagcccctaaaaatgttacttctatgataaacttaaagaccattgcttcatcagcagatcctaaaaatgttagtataccatcttctgaagctttatcttcggatccttcctacaacaaagaaaaacacattattcatcctacccaaaagtctaaagcatcacaaggtagtgaccttgaacaaaatgaagcctcaagaaagaataagaaaaagaaagaaaaatctacatcaaaatatgaagtcctgacagttcaagagcctccaaggattgaagatgccgaggaatttcccaacctggcagttgcatctgaaagaagagacagaatagagacaccgaaatttcaatctaagcagcagccacaggataattttaaaaataatgtaaagaagagccagcttccagtgcagttggacttggggggcatgctgacagccctggagaagaagcagcactctcagcatgcaaagcagtcctccaaaccagtggtagtctcagttggagcagtgccagtcctttccaaagaatgtgcatcaggggagagaggccgccgcatgagtcaaatgaagaccccgcacaatcccttggactccagcgccccactgatgaagaaagggaagcagagggagatccccaaggccaagaagccaacctcactgaagaagattattttgaaagaacggcaagagagaaagcagcgtctccaagaaaatgctgtgagtccagcttttaccagtgatgacacacaagatggagagagtggtggtgatgaccagtttcccgagcaggcagagctgtcagggccagaggggatggacgaactgatctccactccttcggttgaggacaagtctgaagagccaccaggcacagagctccagagggacacagaggcctcccaccttgctcccaatcacaccaccttccctaagatccacagccgcagattcagggattactgcagccagatgcttagtaaagaagtggatgcttgtgttaccgacctactcaaagaactggtccgtttccaagaccgtatgtaccagaaagatccagtcaaggccaagactaaacgtcgacttgtgttggggttgagggaggttctcaaacacctgaagctcaaaaaactgaaatgtgtcattatttctcccaactgtgagaagatacagtcaaaaggtgggctggatgacactttgcacacaattattgattatgcctgtgagcagaacattccctttgtgtttgctctcaaccgcaaagctctggggcgcagtttgaataaggcagttcctgtcagtgtggtggggatcttcagctatgatggggcccaggatcagttccacaagatggttgagctgacagtggcggcccgacaggcgtacaagaccatgctggagaatgtgcagcaggagctggtgggagagcccaggcctcaggcacctcccagcctacccacacagggccccagctgccctgcagaagatggccccccagccctgaaagaaaaagaagagccacactacattgaaatctggaaaaaacatctggaagcatacagtggatgtaccctggagctagaagaatccttggaggcttcaacctctcaaatgatgaatttgaatttatga

SEQ ID NO: 685 - DNA, 879 bp, Homo Sapiens
atggcggcggcggcggcggcggccgtggcgggggtggggcgcggtggcggtggcgcggagccacggcaggagcggagccgggcccggggctgggccggcgtcgaacgcagcgaaggccggaggatggaaccaggtgaggagctggaagaggagggctctccaggtggccgtgaggatggcttcaccgccgagcacctggctgcagaggccatggcagctgacatggacccctggctagtgtttgatgcccgcacaacgcctgccactgagctggatgcctggctggccaagtacccaccatcccaagttacccgctatggggaccccggttcacccaactcagagcctgtgggctggattgcagtgtatgggcagggctacagccccaactccggggacgtgcagggcctgcaggcagcctgggaagctctgcagaccagtgggcggcccatcacaccgggtaccctgcgccagctcgccatcacccaccacgtgctctcgggcaagtggcttatgcatctggcaccgggcttcaagctggaccacgcctgggctggcattgcccgggccgtggttgaaggccagcttcaggtggccaaggtgagcccacgtgccaaggagggtgggcgccaggtcatctgtgtttacacggacgacttcacggaccgcttgggtgtactggaggcggattcagccatccgtgcagcgggcattaagtgcctgctcacctacaagcctgatgtctacacctacctgggcatctaccgggccaatcgctggcacctctgccccactctctatgagagccgtttccagcttgggggtagtgcccgtggctcccgagtgcttgaccgtgccaacaacgtggaactgacctag

SEQ ID NO: 686 - DNA, 1080 bp, Homo Sapiens
atggtgaagctgttcatcggaaaccttccccgggaggctacagagcaggagattcgctcactcttcgagcagtatgggaaggtgctggaatgtgacatcattaagaattacggctttgtgcacatagaagacaagacggcagctgaggatgccatacgcaacctgcaccattacaagcttcatggggtgaacatcaacgtggaagccagcaagaataagagcaaagcttcaaccaagttacacgtgggtaacatcagccccacttgtaccaaccaagagcttcgagccaagtttgaggagtatggtccggtcatcgaatgtgacatcgtgaaagattatgccttcgtacacatggagcgggcagaggatgcagtggaggccatcaggggccttgacaacacagagtttcaaggcaaaagaatgcatgtgcagttgtccacaagccggcttcggactgcccctggtatgggagaccagagtggctgctatcggtgtgggaaagaagggcactggtccaaagagtgcccagtagatcgtacgggtcgtgtggcagactttactgagcagtataatgaacaatatggagcagttcgaacaccttacaccatgggctacggggaatccatgtattacaacgatgcatatggagcactcgactactataagcgataccgggtccgctcttatgaggcagtagcagcggcggcagcggcttctgcatacaactacgcagagcagaccatgtcccatctgcctcaagtccaaagcacaactgtgaccagccacctcaactctacttctgttgatccctatgacagacacctattgccaaactctggcgctgctgccacttcagctgctatggctgctgctgcagccaccacttcctcctactatggaagggacaggagcccactgcgtcgtgctgcagccatgctccccacagttggagagggctacggttatgggccagagagtgaattatctcaggcttccgcagctacacggaattctctgtatgacatggcccggtatgaacgggagcagtatgtggaccgagcccggtactcagccttttaa

SEQ ID NO: 687 - DNA, 789 bp, Homo Sapiens
atggccttgggattaaagtgcttccgcatggtccaccctacctttcgcaattatcttgcagcctctatcagacccgtttcagaagttacactgaagacagtgcatgaaagacaacatggccataggcaatacatggcctattcagctgtaccagtccgccattttgctaccaagaaagccaaagccaaagggaaaggacagtcccaaaccagagtgaatattaatgctgccttggttgaggatataatcaacttggaagaggtgaatgaagaaatgaagtctgtgatagaagctctcaaggataatttcaataagactctcaatataaggacctcaccaggatcccttgacaagattgctgtggtaactgctgacgggaagcttgctttaaaccagattagccagatctccatgaagtcgccacagctgattttggtgaatatggccagcttcccagagtgtacagctgcagctatcaaggctataagagaaagtggaatgaatctgaacccagaagtggaagggacgctaattcgggtacccattccccaagtaaccagagagcacagagaaatgctggtgaaactggccaaacagaacaccaacaaggccaaagactctttacggaaggttcgcaccaactcaatgaacaagctgaagaaatccaaggatacagtctcagaggacaccattaggctaatagagaaacagatcagccaaatggccgatgacacagtggcagaactggacaggcatctggcagtgaagaccaaagaactccttggatga

SEQ ID NO: 688 - DNA, 1230 bp, Homo Sapiens
atgcagcgcctggccatggacctgcggatgttgtcccgggagctctccctctacctggaacaccaagtccgggtggggttcttcggctcgggggtgggcttatcccttatcctgggcttcagcgtcgcttatgccttctactacctgagcagcattgccaagaaaccccagttagtgaccgggggtgagagtttcagccgcttccttcaagaccactgtcccgtggttacagaaacgtactacccgacggtctggtgctgggagggtcgaggacagaccctgcttagacctttcatcacttcgaagcccccggtgcagtacaggaatgaacttattaaaactgcagatggaggacagatttcactggactggtttgataatgataacagtacgtgttatatggatgccagcaccagacctactatcttattgttgcctggcctcacgggaacaagcaaggagtcatatatccttcatatgatccatcttagtgaagaattaggatacagatgtgtggtttttaacaacagaggagtggcgggggagaatctcttgacgccaaggacttattgttgtgctaacactgaagacttggagacagttattcaccatgtacacagcctgtacccttctgctcctttcctggcagcaggggtttcaatgggaggaatgctgcttctaaattacttgggcaaaattgggtccaaaacgcctttgatggcagctgcaactttttccgttggttggaacaccttcgcttgctcagagtcattggaaaaaccactgaactggctactttttaattactatttgacaacctgccttcagtcttcagttaataagcaccgacatatgtttgtaaaacaagttgatatggatcatgtcatgaaggctaaatccatcagagagtttgataagcgattcacttcagtcatgtttggataccaaacaattgatgattattatactgatgccagtccgagtcctagactgaagtcagtaggaattccagtattgtgtctaaattctgtggatgatgttttctcacccagtcatgctattccaatagaaactgctaagcaaaatcctaatgttgctttggtccttacttcttatggaggccatattggttttctggagggaatctggccaagacagtccacttacatggatcgtgtcttcaagcaatttgtgcaagccatggttgagcatggacatgaactctcttaa

SEQ ID NO: 689 - DNA, 4281 bp, Homo Sapiens
atgaacgactggcacaggatcttcacccaaaacgtgcttgtccctccccacccacagagagcgcgccagccttggaaggaatccacggcattccagtgtgtcctcaagtggctggacggaccggtaattaggcagggcgtgctggaggtactgtcagaggttgaatgccatctgcgagtgtctttctttgatgtcacctaccggcacttctttgggaggacgtggaaaaccacagtgaagccgacgaagagaccgccgtccaggatcgtctttaatgagcccttgtattttcacacatccctaaaccaccctcatatcgtggctgtggtggaagtggtcgctgagggcaagaaacgggatgggagcctccagacattgtcctgtgggtttggaattcttcggatcttcagcaaccagccggactctcctatctctgcttcccaggacaaaaggttgcggctgtaccatggcacccccagagccctcctgcacccgcttctccaggaccccgcagagcaaaacagacacatgaccctcattgagaactgcagcctgcagtacacgctgaagccacacccggccctggagcctgcgttccaccttcttcctgagaaccttctggtgtctggtctgcagcagatacctggcctgcttccagctcatggagaatccggcgacgctctccgaaagcctcgcctccagaagcccatcacggggcacttggatgacttattcttcaccctgtacccctccctggagaagtttgaggaagagctgctggagctccacgtccaggaccacttccaggagggatgtggcccactggacggtggtgccctggagatcctggagcggcgcctgcgtgtgggcgtgcacaatggtctgggcttcgtgcagaggccgcaggtcgttgtactggtgcctgagatggatgtggccttgacgcgctcagctagcttcagcaggaaagtggtctcctcttccaagaccagctccgggagccaagctctggttttgagaagccgcctccgcctcccagagatggtcggccaccctgcatttgcggtcatcttccagctggagtacgtgttcagcagccctgcaggagtggacggcaatgcagcttcggtcacctctctgtccaacctggcatgcatgcacatggtccgctgggctgtttggaaccccttgctggaagctgattctggaagggtgaccctgcctctgcagggtgggatccagcccaacccctcgcactgtctggtctacaaggtaccctcagccagcatgagctctgaagaggtgaagcaggtggagtcgggtacactccggttccagttctcgctgggctcagaagaacacctggatgcacccacggagcctgtcagtggccccaaagtggagcggcggccttccaggaaaccacccacgtccccttcgagcccgccagcgccagtacctcgagttctcgctgccccgcagaactcacctgtgggaccagggttgtcaatttcccagctggcggcctccccgcggtccccgactcagcactgcttggccaggcctacttcacagctaccccatggctctcaggcctccccggcccaggcacaggagttcccgttggaggccggtatctcccacctggaagccgacctgagccagacctccctggtcctggaaacatccattgccgaacagttacaggagctgccgttcacgcctttgcatgcccctattgttgtgggaacccagaccaggagctctgcagggcagccctcgagagcctccatggtgctcctgcagtcctccggctttcccgagattctggatgccaataaacagccagccgaggctgtcagcgctacagaacctgtgacgtttaaccctcagaaggaagaatcagattgtctacaaagcaacgagatggtgctacagtttcttgcctttagcagagtggcccaggactgccgaggaacatcatggccaaagactgtgtatttcaccttccagttctaccgcttcccacccgcaacgacgccacgactgcagctggtccagctggatgaggccggccagcccagctctggcgccctgacccacatcctcgtgcctgtgagcagagatggcacctttgatgctgggtctcctggcttccagctgaggtacatggtgggccctgggttcctgaagccaggtgagcggcgctgctttgcccgctacctggccgtgcagaccctgcagattgacgtctgggacggagactccctgctgctcatcggatctgctgccgtccagatgaagcatctcctccgccaaggccggccggctgtgcaggcctcccacgagcttgaggtcgtggcaactgaatacgagcaggacaacatggtggtgagtggagacatgctggggtttggccgcgtcaagcccatcggcgtccactcggtggtgaagggccggctgcacctgactttggccaacgtgggtcacccgtgtgaacagaaagtgagaggttgtagcacattgccaccgtccagatctcgggtcatctcaaacgatggagccagccgcttctctggaggcagcctcctcacgactggaagctcaaggcgaaaacacgtggtgcaagcacagaagctggcggacgtggacagtgagctggctgccatgctactgacccatgcccggcagggcaaggggccccaggacgtcagccgcgagtcggatgccacccgcaggcgtaagctggagcggatgaggtctgtgcgcctgcaggaggccgggggagacttgggccggcgcgggacgagcgtgttggcgcagcagagcgtccgcacacagcacttgcgggacctacaggtcatcgccgcctaccgggaacgcacgaaggccgagagcatcgccagcctgctgagcctggccatcaccacggagcacacgctccacgccacgctgggggtcgccgagttctttgagtttgtgcttaagaacccccacaacacacagcacacggtgactgtggagatcgacaaccccgagctcagcgtcatcgtggacagtcaggagtggagggacttcaagggtgctgctggcctgcacacaccggtggaggaggacatgttccacctgcgtggcagcctggccccccagctctacctgcgcccccacgagaccgcccacgtccccttcaagttccagagcttctctgcagggcagctggccatggtgcaggcctctcctgggttgagcaacgagaagggcatggacgccgtgtcaccttggaagtccagcgcagtgcccactaaacacgccaaggtcttgttccgagcgagtggtggcaagcccatcgccgtgctctgcctgactgtggagctgcagccccacgtggtggaccaggtcttccgcttctatcacccggagctctccttcctgaagaaggccatccgcctgccgccctggcacacatttccaggtgctccggtgggaatgcttggtgaggaccccccagtccatgttcgctgcagcgacccgaacgtcatctgtgagacccagaatgtgggccccggggaaccacgggacatatttctgaaggtggccagtggtccaagcccggagatcaaagacttctttgtcatcatttactcggatcgctggctggcgacacccacacagacgtggcaggtctacctccactccctgcagcgcgtggatgtctcctgcgtcgcaggccagctgacccgcctgtcccttgtccttcgggggacacagacagtgaggaaagtgagagctttcacctctcatccccaggagctgaagacagaccccaaaggtgtcttcgtgctgccgcctcgtggggtgcaggacctgcatgttggcgtgaggccccttagggccggcagccgctttgtccatctcaacctggtggacgtggattgccaccagctggtggcctcctggctcgtgtgcctctgctgccgccagccgctcatctccaaggcctttgagatcatgttggctgcgggcgaagggaagggtgtcaacaagaggatcacctacaccaacccctacccctcccggaggacattccacctgcacagcgaccacccggagctgctgcggttcagagaggactccttccaggtcgggggtggagagacctacaccatcggcttgcagtttgcgcctagtcagagagtgggtgaggaggagatcctgatctacatcaatgaccatgaggacaaaaacgaagaggcattttgcgtgaaggtcatctaccagtga

SEQ ID NO: 690 - DNA, 651 bp, Homo Sapiens
atgtggccgccttgcgggacgctccggaccctggccttggcgcggtcgcggggagcccgggcctgcagcggggatgggggcgtttcctacacgcagggccagagtccggagccgcggacccgcgagtatttctactacgtggaccaccagggccagcttttcctggatgattccaaaatgaagaatttcatcacctgcttcaaagacccgcagttcctggtcaccttcttctcccgcctgagacccaaccgcagcgggcgctacgaggccgctttccccttcctctcgccctgcggcagagagcgcaacttcctgcgctgcgaggaccggccggtggtcttcacgcacctgctgaccgcggaccacgggcctccgcgcctctcctactgcggcggtggcgaggccctggccgtgcccttcgagccggcgcgcctgctgcccctggccgccaacgggcgcctgtaccacccggcgccggagcgtgcgggcggcgtgggcctggtgcgctccgccctggccttcgagctcagcgcctgcttcgagtacgggcccggcgcgcctgcgctgccctcgcacgtgcgctggcagggccgccgcctcgccctcaccatggacctggccccgctgctgctcgcggctcggtcgccctga

SEQ ID NO: 691 - DNA, 2181 bp, Homo Sapiens
atgagcgaagagacggtccccgaggctgcctcgccgccgcccccgcaggggcagccttactttgaccgcttctcagaggacgaccccgagtacatgcgccttcgcaaccgggcggcggacctgcggcaggacttcaacctgatggagcagaagaagcgcgtcaccatgatcctgcagagtccctctttcagggaggagctggaaggcctcatccaggagcagatgaagaaggggaacaactcctccaacatctgggccctgcgacagatcgcggacttcatggccagcacctcccacgcagtcttcccgacatcttccatgaatgtctccatgatgacgcctatcaatgacctccacacagctgactccctgaacctggccaaaggggagcggctcatgcggtgcaagatcagcagtgtctaccgactcctggacctctatggctgggcccagctgagtgacacctatgtcacgttgagagtcagcaaggagcaggaccacttcctgatcagccctaagggagtttcttgcagtgaagtcacagcgtccagcctgatcaaggtgaacattctgggagaggtggtggagaagggcagcagctgcttcccagtggacaccacaggcttctgtctgcactcggccatctatgcagcgaggcccgacgtgcgctgcatcatccacctgcacacaccggccacagcagcggtgtcggccatgaagtggggcctcctgcctgtctcccacaatgccctgctggtgggggacatggcctattatgacttcaatggggaaatggagcaggaagccgatcggatcaacctgcagaagtgccttggacccacctgcaagatcctggtgctaagaaaccatggagtggttgctctgggtgacacggtagaggaggcattttacaagatcttccacctgcaggctgcatgtgagatacaggtgtcggctctgtccagtgccgggggagtggagaacctcatcctcctggagcaggagaagcaccggccccatgaggtgggctccgtgcagtgggccgggagcacctttgggcctatgcagaagagtcggctgggggagcatgagtttgaggccctcatgaggatgctggacaacctgggctacagaacaggttacacgtatcgccacccctttgttcaagagaaaaccaaacacaaaagtgaggtggagattccagccacggtcacagccttcgtgtttgaggaggacggtgccccggtgcccgccctgcgacagcatgcccagaagcagcagaaggagaagacccgctggctcaatacgcccaacacctacctgcgggtcaatgtggccgatgaggtccagaggagcatgggcagcccccgacccaagaccacgtggatgaaggctgacgaggtggagaaatccagcagtggcatgccgattcgcatcgaaaacccaaaccaatttgtgcctctctatactgacccccaggaagtactggagatgaggaacaagattcgagaacaaaaccgacaagatgtgaagtcagcggggcctcagtcccagctcctggcgagcgtcattgccgagaagagccgaagcccgtctacagagagccagctgatgtccaagggagacgaggataccaaagacgattcagaggagacggtgcccaaccccttcagccaactcactgaccaggagttggaggagtacaagaaagaggtggagaggaagaaactagaacttgatggagagaaagaaactgccccagaagagcctggctcacctgcaaagtctgcacctgcttctccagtgcagagcccagcgaaggaggcagagacaaagagccctttagtctctccttccaagtctttagaggaaggtactaagaagacagaaacaagcaaagccgccaccacagagcccgaaacaacccagccggaaggggtggtggtcaacgggagggaggaggagcagacggcagaggaaatcctcagcaaaggcctgagccagatgaccaccagtgctgacacggatgttgatacctctaaggacaaaaccgagtcggtcaccagcggccccatgtccccagagggctcaccttccaagtctccctcaaagaagaaaaagaaattccgaaccccctccttcctgaaaaagagcaaaaagaaggagaaagtggagtcctga

SEQ ID NO: 692 - DNA, 2070 bp, Homo Sapiens
atggcggacctggaggcggtgctggccgacgtgagctacctgatggccatggagaagagcaaggccacgccggccgcgcgcgccagcaagaagatcctgctgcccgagcccagcatccgcagtgtcatgcagaagtacctggaggaccggggcgaggtgacctttgagaagatcttttcccagaagctggggtacctgctcttccgagacttctgcctgaaccacctggaggaggccaggcccttggtggaattctatgaggagatcaagaagtacgagaagctggagacggaggaggagcgtgtggcccgcagccgggagatcttcgactcatacatcatgaaggagctgctggcctgctcgcatcccttctcgaagagtgccactgagcatgtccaaggccacctggggaagaagcaggtgcctccggatctcttccagccatacatcgaagagatttgtcaaaacctccgaggggacgtgttccagaaattcattgagagcgataagttcacacggttttgccagtggaagaatgtggagctcaacatccacctgaccatgaatgacttcagcgtgcatcgcatcattgggcgcgggggctttggcgaggtctatgggtgccggaaggctgacacaggcaagatgtacgccatgaagtgcctggacaaaaagcgcatcaagatgaagcagggggagaccctggccctgaacgagcgcatcatgctctcgctcgtcagcactggggactgcccattcattgtctgcatgtcatacgcgttccacacgccagacaagctcagcttcatcctggacctcatgaacggtggggacctgcactaccacctctcccagcacggggtcttctcagaggctgacatgcgcttctatgcggccgagatcatcctgggcctggagcacatgcacaaccgcttcgtggtctaccgggacctgaagccagccaacatccttctggacgagcatggccacgtgcggatctcggacctgggcctggcctgtgacttctccaagaagaagccccatgccagcgtgggcacccacgggtacatggctccggaggtcctgcagaagggcgtggcctacgacagcagtgccgactggttctctctggggtgcatgctcttcaagttgctgcgggggcacagccccttccggcagcacaagaccaaagacaagcatgagatcgaccgcatgacgctgacgatggccgtggagctgcccgactccttctcccctgaactacgctccctgctggaggggttgctgcagagggatgtcaaccggagattgggctgcctgggccgaggggctcaggaggtgaaagagagcccctttttccgctccctggactggcagatggtcttcttgcagaagtaccctcccccgctgatccccccacgaggggaggtgaacgcggccgacgccttcgacattggctccttcgatgaggaggacacaaaaggaatcaagttactggacagtgatcaggagctctaccgcaacttccccctcaccatctcggagcggtggcagcaggaggtggcagagactgtcttcgacaccatcaacgctgagacagaccggctggaggctcgcaagaaagccaagaacaagcagctgggccatgaggaagactacgccctgggcaaggactgcatcatgcatggctacatgtccaagatgggcaaccccttcctgacccagtggcagcggcggtacttctacctgttccccaaccgcctcgagtggcggggcgagggcgaggccccgcagagcctgctgaccatggaggagatccagtcggtggaggagacgcagatcaaggagcgcaagtgcctgctcctcaagatccgcggtgggaaacagttcattttgcagtgcgatagcgaccctgagctggtgcagtggaagaaggagctgcgcgacgcctaccgcgaggcccagcagctggtgcagcgggtgcccaagatgaagaacaagccgcgctcgcccgtggtggagctgagcaaggtgccgctggtccagcgcggcagtgccaacggcctctga

SEQ ID NO: 693 - DNA, 1368 bp, Homo Sapiens
atgagcagctcgggactgaattcggagaaggtagctgctctgatacagaaactgaattccgacccccagttcgtacttgcccagaatgtcgggaccacccacgacctgctggacatctgtctgaagcgggccacggtgcagcgcgcgcagcatgtgttccagcacgccgtgccccaggagggcaagccaatcaccaaccagaagagctcagggcgatgctggatcttttcttgtctgaatgttatgaggcttccattcatgaaaaagttaaatattgaagaatttgagtttagccaatcttacctgtttttttgggacaaggttgaacgctgttatttcttcttgagtgcttttgtggacacagcccagagaaaggagcctgaggatgggaggctggtgcagtttttgcttatgaaccctgcaaatgatggtggccaatgggatatgcttgttaatattgttgaaaaatatggtgttatccctaagaaatgcttccctgaatcttatacaacagaggcaaccagaaggatgaatgatattctgaatcacaagatgagagaattctgtatacgactgcggaacctggtacacagtggagcaaccaaaggagaaatctcggccacacaggacgtcatgatggaggagatattccgagtggtgtgcatctgtttgggtaatccaccagagacattcacctgggaatatcgagacaaagataaaaattatcagaaaattggccccataacacccttggagttttacagggaacatgtcaagccactcttcaatatggaagataagatttgtttagtgaatgaccctaggccccagcacaagtacaacaaactttacacagtggaatacttaagcaatatggttggagggagaaaaactctatacaacaaccagcccattgacttcctgaaaaagatggttgctgcctccatcaaagatggagaggctgtgtggtttggctgtgatgttggaaaacacttcaatagcaagctgggcctcagtgacatgaatctctatgaccatgagttagtgtttggtgtctccttgaagaacatgaataaagcggagaggctgacttttggtgagtcacttatgacccacgccatgaccttcactgctgtctcagagaaggatgatcaggatggtgctttcacaaaatggagagtggagaattcatggggtgaagaccatggccacaaaggttacctgtgcatgacagatgagtggttctctgagtatgtctacgaagtggtggtggacaggaagcatgtccctgaagaggtgctagctgtgttagagcaggaacccattatcctgccagcatgggaccccatgggagctttggctgagtga

SEQ ID NO: 694 - DNA, 2721 bp, Homo Sapiens
atgactgctgtccatgcaggcaacataaacttcaagtgggatcctaaaagtctagagatcaggactctggcagttgagagactgttggagcctcttgttacacaggttacaacccttgtaaacaccaatagtaaagggccctctaataagaagagaggtcgttctaagaaggcccatgttttggctgcatctgttgaacaagcaactgagaatttcttggagaagggggataaaattgcgaaggagagccagtttctcaaggaggagcttgtggctgctgtagaagatgttcgaaaacaaggtgatttgatgaaggctgctgcaggagagttcgcagatgatccctgctcttctgtgaagcgaggcaacatggttcgggcagctcgagctttgctctctgctgttacccggttgctgattttggctgacatggcagatgtctacaaattacttgttcagctgaaagttgtggaagatggtatcttgaagttgaggaatgctggcaatgaacaagacttaggaatccagtataaagccctaaaacctgaagtggataagctgaacattatggcagccaaaagacaacaggaattgaaagatgttggccatcgtgatcagatggctgcagctagaggaatcctgcagaagaacgttccgatcctctatactgcatcccaggcatgcctacagcaccctgatgtcgcagcctataaggccaacagggacctgatatacaagcagctgcagcaggcggtcacaggcatttccaatgcagcccaggccactgcctcagacgatgcctcacagcaccagggtggaggaggaggagaactggcatatgcactcaataactttgacaaacaaatcattgtggaccccttgagcttcagcgaggagcgctttaggccttccctggaggagcgtctggaaagcatcattagtggggctgccttgatggccgactcgtcctgcacgcgtgatgaccgtcgtgagcgaattgtggcagagtgtaatgctgtccgccaggccctgcaggacctgctttcggagtacatgggcaatgctggacgtaaagaaagaagtgatgcactcaattctgcaatagataaaatgaccaagaagaccagggacttgcgtagacagctccgcaaagctgtcatggaccacgtttcagattctttcctggaaaccaatgttccacttttggtattgattgaagctgcaaagaatggaaatgagaaagaagttaaggagtatgcccaagttttccgtgaacatgccaacaaattgattgaggttgccaacttggcctgttccatctcaaataatgaagaaggtgtaaagcttgttcgaatgtctgcaagccagttagaagccctctgtcctcaggttattaatgctgcactggctttagcagcaaaaccacagagtaaactggcccaagagaacatggatctttttaaagaacaatgggaaaaacaagtccgtgttctcacagatgctgtcgatgacattacttccattgatgacttcttggctgtctcagagaatcacattttggaagatgtgaacaaatgtgtcattgctctccaagagaaggatgtggatggcctggaccgcacagctggtgcaattcgaggccgggcagcccgggtcattcacgtagtcacctcagagatggacaactatgagccaggagtctacacagagaaggttctggaagccactaagctgctctccaacacagtcatgccacgttttactgagcaagtagaagcagccgtggaagccctcagctcggaccctgcccagcccatggatgagaatgagtttatcgatgcttcccgcctggtatatgatggcatccgggacatcaggaaagcagtgctgatgataaggacccctgaggagttggatgactctgactttgagacagaagattttgatgtcagaagcaggacgagcgtccagacagaagacgatcagctgatagctggccagagtgcccgggcgatcatggctcagcttccccaggagcaaaaagcgaagattgcggaacaggtggccagcttccaggaagaaaagagcaagctggatgctgaagtgtccaaatgggacgacagtggcaatgacatcattgtgctggccaagcagatgtgcatgattatgatggagatgacagactttacccgaggtaaaggaccactcaaaaatacatcggatgtcatcagtgctgccaagaaaattgctgaggcaggatccaggatggacaagcttggccgcaccattgcagaccattgccccgactcggcttgcaagcaggacctgctggcctacctgcaacgcatcgccctctactgccaccagctgaacatctgcagcaaggtcaaggccgaggtgcagaatctcggcggggagcttgttgtctctggggtggacagcgccatgtccctgatccaggcagccaagaacttgatgaatgctgtggtgcagacagtgaaggcatcctacgtcgcctctaccaaataccaaaagtcacagggtatggcttccctcaaccttcctgctgtgtcatggaagatgaaggcaccagagaaaaagccattggtgaagagagagaaacaggatgagacacagaccaagattaaacgggcatctcagaagaagcacgtgaacccggtgcaggccctcagcgagttcaaagctatggacagcatctaa

SEQ ID NO: 695 - DNA, 1788 bp, Homo Sapiens
atggccttgactgacggcggctggtgcttgccgaagcgcttcggggccgcgggtgcggacgccagcgactccagagcctttccagcgcgggagccctccacgccgccttcccccatctcttcctcgtcctcctcctgctcccggggcggagagcggggccccggcggcgccagcaactgcgggacgcctcagctcgacacggaggcggcggccggacccccggcccgctcgctgctgctcagttcctacgcttcgcatcccttcggggctccccacggaccttcggcgcctggggtcgcgggccccgggggcaacctgtcgagctgggaggacttgctgctgttcactgacctcgaccaagccgcgaccgccagcaagctgctgtggtccagccgcggcgccaagctgagccccttcgcacccgagcagccggaggagatgtaccagaccctcgccgctctctccagccagggtccggccgcctacgacggcgcgcccggcggcttcgtgcactctgcggccgcggcggcagcagccgcggcggcggccagctccccggtctacgtgcccaccacccgcgtgggttccatgctgcccggcctaccgtaccacctgcaggggtcgggcagtgggccagccaaccacgcgggcggcgcgggcgcgcaccccggctggcctcaggcctcggccgacagccctccatacggcagcggaggcggcgcggctggcggcggggccgcggggcctggcggcgctggctcagccgcggcgcacgtctcggcgcgcttcccctactctcccagcccgcccatggccaacggcgccgcgcgggagccgggaggctacgcggcggcgggcagtgggggcgcgggaggcgtgagcggcggcggcagtagcctggcggccatgggcggccgcgagccccagtacagctcgctgtcggccgcgcggccgctgaacgggacgtaccaccaccaccaccaccaccaccaccaccatccgagcccctactcgccctacgtgggggcgccactgacgcctgcctggcccgccggacccttcgagaccccggtgctgcacagcctgcagagccgcgccggagccccgctcccggtgccccggggtcccagtgcagacctgctggaggacctgtccgagagccgcgagtgcgtgaactgcggctccatccagacgccgctgtggcggcgggacggcaccggccactacctgtgcaacgcctgcgggctctacagcaagatgaacggcctcagccggcccctcatcaagccgcagaagcgcgtgccttcatcacggcggcttggattgtcctgtgccaactgtcacaccacaactaccaccttatggcgcagaaacgccgagggtgaacccgtgtgcaatgcttgtggactctacatgaaactccatggggtgcccagaccacttgctatgaaaaaagagggaattcaaaccaggaaacgaaaacctaagaacataaataaatcaaagacttgctctggtaatagcaataattccattcccatgactccaacttccacctcttctaactcagatgattgcagcaaaaatacttcccccacaacacaacctacagcctcaggggcgggtgccccggtgatgactggtgcgggagagagcaccaatcccgagaacagcgagctcaagtattcgggtcaagatgggctctacataggcgtcagtctcgcctcgccggccgaagtcacgtcctccgtgcgaccggattcctggtgcgccctggccctggcctga

SEQ ID NO: 696 - DNA, 585 bp, Homo Sapiens
atgaccgagaattccacgtccgcccctgcggccaagcccaagcgggccaaggcctccaagaagtccacagaccaccccaagtattcagacatgatcgtggctgccatccaggccgagaagaaccgcgctggctcctcgcgccagtccattcagaagtatatcaagagccactacaaggtgggtgagaacgctgactcgcagatcaagttgtccatcaagcgcctggtcaccaccggtgtcctcaagcagaccaaaggggtgggggcctcggggtccttccggctagccaagagcgacgaacccaagaagtcagtggccttcaagaagaccaagaaggaaatcaagaaggtagccacgccaaagaaggcatccaagcccaagaaggctgcctccaaagccccaaccaagaaacccaaagccaccccggtcaagaaggccaagaagaagctggctgccacgcccaagaaagccaaaaaacccaagactgtcaaagccaagccggtcaaggcatccaagcccaaaaaggccaaaccagtgaaacccaaagcaaagtccagtgccaagagggccggcaagaagaagtga

SEQ ID NO: 697 - DNA, 2067 bp, Homo Sapiens
atggacggctccttcgtccagcacagtgtgagggttctgcaggagctcaacaagcagcgggagaagggccagtactgcgacgccactctggacgtggggggcctggtgtttaaggcacactggagtgtccttgcctgctgcagtcactttttccagagcctctacggggatggctcagggggcagtgtcgtcctccctgctggcttcgctgagatctttggcctcttgttggactttttctacactggtcacctcgctctcacctcagggaaccgggatcaggtgctcctggcagccagggagttgcgagtgccagaggccgtagagctgtgccagagcttcaagcccaaaacttcagtgggacaggcagcaggtggccagagtgggctggggccccctgcctcccagaatgtgaacagccacgtcaaggagccggcaggcttggaagaagaggaagtttcgaggactctgggtctagtccccagggatcaggagcccagaggcagtcatagtcctcagaggccccagctccattccccagctcagagtgagggcccctcctccctctgtgggaaactgaagcaggccttgaagccttgtccccttgaggacaagaaacccgaggactgcaaagtgcccccaaggcccttagaggctgaaggtgcccagctgcagggcggcagtaatgagtgggaagtggtggttcaagtggaggatgatggggatggcgattacatgtctgagcctgaggctgtgctgaccaggaggaagtcaaatgtaatccgaaagccctgtgcagctgagccagccctgagcgcgggctccctagcagctgagcctgctgagaacagaaaaggtacagcggtgccggtcgaatgccccacatgtcataaaaagttcctcagcaaatattatctaaaagtccacaacaggaaacatactggggagaaaccctttgagtgtcccaaatgtgggaagtgttactttcggaaggagaacctcctggagcatgaagcccggaattgcatgaaccgctcggaacaggtcttcacgtgctctgtgtgccaggagacattccgccgaaggatggagctgcgggtgcacatggtgtctcacacaggggagatgccctacaagtgttcctcctgctcccagcagttcatgcagaagaaggacttgcagagccacatgatcaaacttcatggagcccccaagccccatgcatgccccacctgtgccaagtgcttcctgtctcggacagagctgcagctgcatgaagctttcaagcaccgtggtgagaagctgtttgtgtgtgaggagtgtgggcaccgggcctcgagccggaatggcctgcagatgcacatcaaggccaagcacaggaatgagaggccacacgtatgtgagttctgcagccacgccttcacccaaaaggccaatctcaacatgcacctgcgcacacacacgggtgagaagcccttccagtgccacctctgtggcaagaccttccgaacccaagccagcctggacaagcacaaccgcacccacaccggggaaaggcccttcagttgcgagttctgtgaacagcgcttcactgagaaggggcccctcctgaggcacgtggccagccgccatcaggagggccggccccacttctgccagatatgcggcaagaccttcaaagccgtggagcaactgcgtgtgcacgtcagacggcacaagggggtgaggaagtttgagtgcaccgagtgtggctacaagtttacccgacaggcccacctgcggaggcacatggagatccacgaccgggtagagaactacaacccgcggcagcgcaagctccgcaacctgatcatcgaggacgagaagatggtggtggtggcgctgcagccgcctgcagagctggaggtgggctcggcggaggtcattgtggagtccctggcccagggcggcctggcctcccagctccccggccagagactgtgtgcagaggagagcttcaccggcccaggtgtcctggagccctccctcatcatcacagctgctgtccccgaggactgtgacacatag

SEQ ID NO: 698 - DNA, 2211 bp, Homo Sapiens
atgggctcaccgctgaggttcgacgggcgggtggtactggtcaccggcgcgggggcaggattgggccgagcctatgccctggcttttgcagaaagaggagcgttagttgttgtgaatgatttgggaggggacttcaaaggagttggtaaaggctccttagctgctgataaggttgttgaagaaataagaaggagaggtggaaaagcagtggccaactatgattcagtggaagaaggagagaaggttgtgaagacagccctggatgcttttggaagaatagatgttgtggtcaacaatgctggaattctgagggatcgttcctttgctaggataagtgatgaagactgggatataatccacagagttcatttgcggggttcattccaagtgacacgggcagcatgggaacacatgaagaaacagaagtatggaaggattattatgacttcatcagcttcaggaatatatggcaactttggccaggccaattatagtgctgcaaagttgggtcttctgggccttgcaaattctcttgcaattgaaggcaggaaaagcaacattcattgtaacaccattgctcctaatgcgggatcacggatgactcagacagttatgcctgaagatcttgtggaagccctgaagccagagtatgtggcacctcttgtcctttggctttgtcacgagagttgtgaggagaatggtggcttgtttgaggttggagcaggatggattggaaaattacgctgggagcggactcttggagctattgtaagacaaaagaatcacccaatgactcctgaggcagtcaaggctaactggaagaagatctgtgactttgagaatgccagcaagcctcagagtatccaagaatcaactggcagtataattgaagttctgagtaaaatagattcagaaggaggagtttcagcaaatcatactagtcgtgcaacgtctacagcaacatcaggatttgctggagctattggccagaaactccctccattttcttatgcttatacggaactggaagctattatgtatgcccttggagtgggagcgtcaatcaaggatccaaaagatttgaaatttatttatgaaggaagttctgatttctcctgtttgcccaccttcggagttatcataggtcagaaatctatgatgggtggaggattagcagaaattcctggactttcaatcaactttgcaaaggttcttcatggagagcagtacttagagttatataaaccacttcccagagcaggaaaattaaaatgtgaagcagttgttgctgatgtcctagataaaggatccggtgtagtgattattatggatgtctattcttattctgagaaggaacttatatgccacaatcagttctctctctttcttgttggctctggaggctttggtggaaaacggacatcagacaaagtcaaggtagctgtagccatacctaatagacctcctgatgctgtacttacagataccacctctcttaatcaggctgctttgtaccgcctcagtggagactggaatcccttacacattgatcctaactttgctagtctagcaggttttgacaagcccatattacatggattatgtacatttggattttctgccaggcgtgtgttacagcagtttgcagataatgatgtgtcaagattcaaggcaattaaggctcgttttgcaaaaccagtatatccaggacaaactctacaaactgagatgtggaaggaaggaaacagaattcattttcaaaccaaggtccaagaaactggagacattgtcatttcaaatgcatatgtggatcttgcaccaacatctggtacttcagctaagacaccctctgagggcgggaagcttcagagtacctttgtatttgaggaaataggacgccgcctaaaggatattgggcctgaggtggtgaagaaagtaaatgctgtatttgagtggcatataaccaaaggcggaaatattggggctaagtggactattgacctgaaaagtggttctggaaaagtgtaccaaggccctgcaaaaggtgctgctgatacaacaatcatactttcagatgaagatttcatggaggtggtcctgggcaagcttgaccctcagaaggcattctttagtggcaggctgaaggccagagggaacatcatgctgagccagaaacttcagatgattcttaaagactacgccaagctctga

SEQ ID NO: 699 - DNA, 2715 bp, Homo Sapiens
atggcggaatcatcggaatccttcaccatggcatccagcccggcccagcgtcggcgaggcaatgatcctctcacctccagccctggccgaagctcccggcgtactgatgccctcacctccagccctggccgtgaccttccaccatttgaggatgagtccgaggggctcctaggcacagaggggcccctggaggaagaagaggatggagaggagctcattggagatggcatggaaagggactaccgcgccatcccagagctggacgcctatgaggccgagggactggctctggatgatgaggacgtagaggagctgacggccagtcagagggaggcagcagagcgggccatgcggcagcgtgaccgggaggctggccggggcctgggccgcatgcgccgtgggctcctgtatgacagcgatgaggaggacgaggagcgccctgcccgcaagcgccgccaggtggagcgggccacggaggacggcgaggaggacgaggagatgatcgagagcatcgagaacctggaggatctcaaaggccactctgtgcgcgagtgggtgagcatggcgggcccccggctggagatccaccaccgcttcaagaacttcctgcgcactcacgtcgacagccacggccacaacgtcttcaaggagcgcatcagcgacatgtgcaaagagaaccgtgagagcctggtggtgaactatgaggacttggcagccagggagcacgtgctggcctacttcctgcctgaggcaccggcggagctgctgcagatctttgatgaggctgccctggaggtggtactggccatgtaccccaagtacgaccgcatcaccaaccacatccatgtccgcatctcccacctgcctctggtggaggagctgcgctcgctgaggcagctgcatctgaaccagctgatccgcaccagtggggtggtgaccagctgcactggcgtcctgccccagctcagcatggtcaagtacaactgcaacaagtgcaatttcgtcctgggtcctttctgccagtcccagaaccaggaggtgaaaccaggctcctgtcctgagtgccagtcggccggcccctttgaggtcaacatggaggagaccatctatcagaactaccagcgtatccgaatccaggagagtccaggcaaagtggcggctggccggctgccccgctccaaggacgccattctcctcgcagatctggtggacagctgcaagccaggagacgagatagagctgactggcatctatcacaacaactatgatggctccctcaacactgccaatggcttccctgtctttgccactgtcatcctagccaaccacgtggccaagaaggacaacaaggttgctgtaggggaactgaccgatgaagatgtgaagatgatcactagcctctccaaggatcagcagatcggagagaagatctttgccagcattgctccttccatctatggtcatgaagacatcaagagaggcctggctctggccctgttcggaggggagcccaaaaacccaggtggcaagcacaaggtacgtggtgatatcaacgtgctcttgtgcggagaccctggcacagcgaagtcgcagtttctcaagtatattgagaaagtgtccagccgagccatcttcaccactggccagggggcgtcggctgtgggcctcacggcgtatgtccagcggcaccctgtcagcagggagtggaccttggaggctggggccctggttctggctgaccgaggagtgtgtctcattgatgaatttgacaagatgaatgaccaggacagaaccagcatccatgaggccatggagcaacagagcatctccatctcgaaggctggcatcgtcacctccctgcaggctcgctgcacggtcattgctgccgccaaccccataggagggcgctacgacccctcgctgactttctctgagaacgtggacctcacagagcccatcatctcacgctttgacatcctgtgtgtggtgagggacaccgtggacccagtccaggacgagatgctggcccgcttcgtggtgggcagccacgtcagacaccaccccagcaacaaggaggaggaggggctggccaatggcagcgctgctgagcccgccatgcccaacacgtatggcgtggagcccctgccccaggaggtcctgaagaagtacatcatctacgccaaggagagggtccacccgaagctcaaccagatggaccaggacaaggtggccaagatgtacagtgacctgaggaaagaatctatggcgacaggcagcatccccattacggtgcggcacatcgagtccatgatccgcatggcggaggcccacgcgcgcatccatctgcgggactatgtgatcgaagacgacgtcaacatggccatccgcgtgatgctggagagcttcatagacacacagaagttcagcgtcatgcgcagcatgcgcaagacttttgcccgctacctttcattccggcgtgacaacaatgagctgttgctcttcatactgaagcagttagtggcagagcaggtgacatatcagcgcaaccgctttggggcccagcaggacactattgaggtccctgagaaggacttggtggataaggctcgtcagatcaacatccacaacctctctgcattttatgacagtgagctcttcaggatgaacaagttcagccacgacctgaaaaggaaaatgatcctgcagcagttctga

SEQ ID NO: 700 - DNA, 1641 bp, Homo Sapiens
atgggtgcctacctctcccagcccaacacggtgaagtgctccggggacggggtcggcgccccgcgcctgccgctgccctacggcttctccgccatgcaaggctggcgcgtctccatggaggatgctcacaactgtattcctgagctggacagtgagacagccatgttttctgtctacgatggacatggaggggaggaagttgccttgtactgtgccaaatatcttcctgatatcatcaaagatcagaaggcctacaaggaaggcaagctacagaaggctttagaagatgccttcttggctattgacgccaaattgaccactgaagaagtcattaaagagctggcacagattgcagggcgacccactgaggatgaagatgaaaaagaaaaagtagctgatgaagatgatgtggacaatgaggaggctgcactgctgcatgaagaggctaccatgactattgaagagctgctgacacgctacgggcagaactgtcacaagggccctccccacagcaaatctggaggtgggacaggcgaggaaccagggtcccagggcctcaatggggaggcaggacctgaggactcaactagggaaactccttcacaagaaaatggccccacagccaaggcctacacaggcttttcctccaactcggaacgtgggactgaggcaggccaagttggtgagcctggcattcccactggtgaggctgggccttcctgctcttcagcctctgacaagctgcctcgagttgctaagtccaagttctttgaggacagtgaggatgagtcagatgaggcggaggaagaagaggaagacagtgaggaatgcagcgaggaagaggatggctacagcagtgaggaggcagagaatgaggaagatgaggatgacaccgaggaggctgaagaggacgatgaagaagaagaagaagagatgatggtgccagggatggaaggcaaagaggagcctggctctgacagtggtacaacagcggtggtggccctgatacgagggaagcagttgattgtagccaacgcaggagactctcgctgtgtggtatctgaggctggcaaagctttagacatgtcctatgatcacaaaccagaggatgaagtagaactagcacgcatcaagaatgctggtggcaaggtcaccatggatgggcgagtcaacgggggcctcaacctctccagagccattggggaccacttctataagagaaacaagaacctgccacctgaggaacagatgatttcagcccttcctgacatcaaggtgctgactctcactgacgaccatgaattcatggtcattgcctgtgatggcatctggaatgtgatgagcagccaggaagttgtagatttcattcaatcaaagatcagccagcgtgatgaaaatggggagcttcggttattgtcatccattgtggaagagctgctggatcagtgcctggcaccagacacttctggggatggtacagggtgtgacaacatgacctgcatcatcatttgcttcaagccccgaaacacagcagagctccagccagagagtggcaagcgaaaactagaggaggtgctctctactgagggggctgaagaaaatggcaacagcgacaagaagaagaaggccaagcgagactag

SEQ ID NO: 701 - DNA, 591 bp, Homo Sapiens
atgagtatgctcaggcttcagaagaggctcgcctctagtgtcctccgctgtggcaagaagaaggtctggttagaccccaatgagaccaatgaaatcgccaatgccaactcccgtcagcagatccggaagctcatcaaagatgggctgatcatccgcaagcctgtgacggtccattcccgggctcgatgccggaaaaacaccttggcccgccggaagggcaggcacatgggcataggtaagcggaagggtacagccaatgcccgaatgccagagaaggtcacatggatgaggagaatgaggattttgcgccggctgctcagaagataccgtgaatctaagaagatcgatcgccacatgtatcacagcctgtacctgaaggtgaaggggaatgtgttcaaaaacaagcggattctcatggaacacatccacaagctgaaggcagacaaggcccgcaagaagctcctggctgaccaggctgaggcccgcaggtctaagaccaaggaagcacgcaagcgccgtgaagagcgcctccaggccaagaaggaggagatcatcaagactttatccaaggaggaagagaccaagaaataa

SEQ ID NO: 702 - DNA, 2124 bp, Homo Sapiens
atgtctcgggatcggttccggagtcgtggcggtggcggtggtggcttccacaggcgtggaggaggcggcggccgcggcggcctccacgacttccgttctccgccgcccggcatgggcctcaatcagaatcgcggccccatgggtcctggcccgggccagagcggccctaagcctccgatcccgccaccgcctccacaccaacagcagcaacagccaccaccgcagcagccaccgccgcagcagccgccaccgcatcagccgccgccgcatccacagccgcatcagcagcagcagccgccgccaccgccgcaggactcttccaagcccgtcgttgctcagggacccggccccgctcccggagtaggcagcgcaccaccagcctccagctcggccccgcccgccactccaccaacctcgggggccccgccagggtccgggccaggcccgactccgaccccgccgcctgcagtcacctcggcccctcccggggcgccgccacccaccccgccaagcagcggggtccctaccacacctcctcaggccggaggcccgccgcctccgcccgcggcagtcccgggcccgggtccagggcctaagcagggcccaggtccgggtggtcccaaaggcggcaaaatgcctggcgggccgaagccaggtggcggcccgggcctaagtacgcctggcggccaccccaagccgccgcatcgaggcggcggggagccccgcgggggccgccagcaccacccgccctaccaccagcagcatcaccaggggcccccgcccggcgggcccggcggccgcagcgaggagaagatctcggactcggaggggtttaaagccaatttgtctctcttgaggaggcctggagagaaaacttacacacagcgatgtcggttgtttgttgggaatctacctgctgatatcacggaggatgaattcaaaagactatttgctaaatatggagaaccaggagaagtttttatcaacaaaggcaaaggattcggatttattaagcttgaatctagagctttggctgaaattgccaaagccgaactggatgatacacccatgagaggtagacagcttcgagttcgctttgccacacatgctgctgccctttctgttcgtaatctttcaccttatgtttccaatgaactgttggaagaagcctttagccaatttggtcctattgaaagggctgttgtaatagtggatgatcgtggaagatctacagggaaaggcattgttgaatttgcttctaagccagcagcaagaaaggcatttgaacgatgcagtgaaggtgttttcttactgacgacaactcctcgtccagtcattgtggaaccacttgaacaactagatgatgaagatggtcttcctgaaaaacttgcccagaagaatccaatgtatcaaaaggagagagaaacccctcctcgttttgcccagcatggcacgtttgagtacgaatattctcagcgatggaagtctttggatgaaatggaaaaacagcaaagggaacaagttgaaaaaaacatgaaagatgcaaaagacaaattggaaagtgaaatggaagatgcctatcatgaacatcaggcaaatcttttgcgccaagatctgatgagacgacaggaagaattaagacgcatggaagaacttcacaatcaagaaatgcagaaacgtaaagaaatgcaattgaggcaagaggaggaacgacgtagaagagaggaagagatgatgattcgtcaacgtgagatggaagaacaaatgaggcgccaaagagaggaaagttacagccgaatgggctacatggatccacgggaaagagacatgcgaatgggtggcggaggagcaatgaacatgggagatccctatggttcaggaggccagaaatttccacctctaggaggtggtggtggcataggttatgaagctaatcctggcgttccaccagcaaccatgagtggttccatgatgggaagtgacatgcgtactgagcgctttgggcagggaggtgcggggcctgtgggtggacagggtcctagaggaatggggcctggaactccagcaggatatggtagagggagagaagagtacgaaggcccaaacaaaaaaccccgattttag

SEQ ID NO: 703 - DNA, 819 bp, Homo Sapiens
atgagtggctgtcgggtattcatcgggagactaaatccagcggccagggagaaggacgtggaaagattcttcaagggatatggacggataagagatattgatctgaaaagaggctttggttttgtggaatttgaggatccaagggatgcagatgatgctgtgtatgagcttgatggaaaagaactctgtagtgaaagggttactattgaacatgctagggctcggtcacgaggtggaagaggtagaggacgatactctgaccgttttagtagtcgcagacctcgaaatgatagacgaaatgctccacctgtaagaacagaaaatcgtcttatagttgagaatttatcctcaagagtcagctggcaggatctcaaagatttcatgagacaagctggggaagtaacgtttgcggatgcacaccgacctaaattaaatgaaggggtggttgagtttgcctcttatggtgacttaaagaatgctattgaaaaactttctggaaaggaaataaatgggagaaaaataaaattaattgaaggcagcaaaaggcacagtaggtcaagaagcaggtctcgatcccggaccagaagttcctctaggtctcgtagccgatcccgttcccgtagtcgcaaatcttacagccggtcaagaagcaggagcaggagccggagccggagcaagtcccgttctgttagtaggtctcccgtgcctgagaagagccagaaacgtggttcttcaagtagatctaagtctccagcatctgtggatcgccagaggtcccggtcccgatcaaggtccagatcagttgacagtggcaattaa

SEQ ID NO: 704 - DNA, 1686 bp, Homo Sapiens
atggcggctgaagagatgcattggcctgtccctatgaaggccattggtgcccagaacctgctaaccatgcctgggggcgtggccaaggctggctacctgcacaagaagggcggtacccagctgcagctgctgaaatggcccctgcgctttgtcatcatccacaaacgctgcgtctactacttcaagagtagcacctctgcctccccgcagggcgccttctccctgagtggctataaccgggtgatgcgggcggctgaggagaccacgtccaacaacgttttccccttcaagatcatccatatcagcaagaagcaccgcacgtggttcttctcggcctcctccgaggaggagcgcaagagctggatggccttgctgcgcagggagattggccacttccacgaaaagaaagacctgcccttggacaccagcgactccagctcggacacagacagcttctacggcgcagttgagcggcctgtggatatcagcctttccccgtaccccacggacaatgaagactatgagcacgacgatgaggatgactcctacctggagcctgactccccggagcccggaaggcttgaggatgccctgatgcacccaccggcttacccaccacccccagtgcccacgcccaggaagccagccttctctgacatgccccgggcccactcctttacctccaagggccccggtcccctactgccacccccgccccctaagcacggcctcccagatgttggcctggctgctgaggactccaagagggacccactgtgcccgaggcgggctgagccttgccccagggtacctgctaccccccgaaggatgagcgatccccctctgagcaccatgcccaccgcacccggcctccggaaacccccttgcttccgggagagtgccagccccagcccggagccctggacccctggccacggggcctgctccacttccagtgctgccatcatggccactgccacctccagaaactgtgacaaactcaagtccttccacctgtccccccgaggaccacccacatctgagcccccacctgtgccagccaacaagcccaagttcctgaagatagctgaagaggaccccccaagggaggcagccatgcccggactctttgtgccccccgtggctccccggcctcctgcgctgaagctgccagtgcctgaggccatggcgcggcccgcagtcctgcccaggccagagaagccgcagctcccgcacctccagcgatcaccccccgatgggcagagtttcaggagcttctcctttgaaaagccccggcaaccctcacaggctgacactggcggggacgactcggacgaggactatgagaaggtgccactgcccaactcggtcttcgtcaacaccacggagtcctgcgaagtggaaaggttgttcaaggctacaagcccccggggagagccccaggatggactctactgcatccggaactcctctaccaagtcggggaaggtcctggttgtgtgggacgaaacctctaacaaagtgaggaactatcgcatttttgagaaggactctaagttctacctggagggcgaggtcctgtttgtgagtgtgggcagcatggtggagcactaccacacccacgtgctgcccagccaccagagcctgctgctgcggcacccctacggctacactgggcctaggtga

SEQ ID NO: 705 - DNA, 1473 bp, Homo Sapiens
atggaacagaagccaagcaaggtggagtgtgggtcagacccagaggagaacagtgccaggtcaccagatggaaagcgaaaaagaaagaacggccaatgttccctgaaaaccagcatgtcagggtatatccctagttacctggacaaagacgagcagtgtgtcgtgtgtggggacaaggcaactggttatcactaccgctgtatcacttgtgagggctgcaagggcttctttcgccgcacaatccagaagaacctccatcccacctattcctgcaaatatgacagctgctgtgtcattgacaagatcacccgcaatcagtgccagctgtgccgcttcaagaagtgcatcgccgtgggcatggccatggacttggttctagatgactcgaagcgggtggccaagcgtaagctgattgagcagaaccgggagcggcggcggaaggaggagatgatccgatcactgcagcagcgaccagagcccactcctgaagagtgggatctgatccacattgccacagaggcccatcgcagcaccaatgcccagggcagccattggaaacagaggcggaaattcctgcccgatgacattggccagtcacccattgtctccatgccggacggagacaaggtggacctggaagccttcagcgagtttaccaagatcatcaccccggccatcacccgtgtggtggactttgccaaaaaactgcccatgttctccgagctgccttgcgaagaccagatcatcctcctgaaggggtgctgcatggagatcatgtccctgcgggcggctgtccgctacgaccctgagagcgacaccctgacgctgagtggggagatggctgtcaagcgggagcagctcaagaatggcggcctgggcgtagtctccgacgccatctttgaactgggcaagtcactctctgcctttaacctggatgacacggaagtggctctgctgcaggctgtgctgctaatgtcaacagaccgctcgggcctgctgtgtgtggacaagatcgagaagagtcaggaggcgtacctgctggcgttcgagcactacgtcaaccaccgcaaacacaacattccgcacttctggcccaagctgctgatgaaggagagagaagtgcagagttcgattctgtacaagggggcagcggcagaaggccggccgggcgggtcactgggcgtccacccggaaggacagcagcttctcggaatgcatgttgttcagggtccgcaggtccggcagcttgagcagcagcttggtgaagcgggaagtctccaagggccggttcttcagcaccagagcccgaagagcccgcagcagcgtctcctggagctgctccaccgaagcggaattctccatgcccgagcggtctgtggggaagacgacagcagtgaggcggactccccgagctcctctgaggaggaaccggaggtctgcgaggacctggcaggcaatgcagcctctccctga

SEQ ID NO: 706 - DNA, 708 bp, Homo Sapiens
atggaccccgctcgccccctggggctgtcgattctgctgcttttcctgacggaggctgcactgggcgatgctgctcaggagccaacaggaaataacgcggagatctgtctcctgcccctagactacggaccctgccgggccctacttctccgttactactacgacaggtacacgcagagctgccgccagttcctgtacgggggctgcgagggcaacgccaacaatttctacacctgggaggcttgcgacgatgcttgctggaggatagaaaaagttcccaaagtttgccggctgcaagtgagtgtggacgaccagtgtgaggggtccacagaaaagtatttctttaatctaagttccatgacatgtgaaaaattcttttccggtgggtgtcaccggaaccggattgagaacaggtttccagatgaagctacttgtatgggcttctgcgcaccaaagaaaattccatcattttgctacagtccaaaagatgagggactgtgctctgccaatgtgactcgctattattttaatccaagatacagaacctgtgatgctttcacctatactggctgtggagggaatgacaataactttgttagcagggaggattgcaaacgtgcatgtgcaaaagctttgaaaaagaaaaagaagatgccaaagcttcgctttgccagtagaatccggaaaattcggaagaagcaattttaa

SEQ ID NO: 707 - DNA, 747 bp, Homo Sapiens
atgttccgcttcatgagggacgtggagcctgaggatcccatgttcctgatggatccctttgctattcaccgtcagcatatgagccgtatgttgtcaggtggctttggatatagccccttcctcagcatcacagatggcaacatgccagggaccaggcctgccagccgccggatgcagcaggctggagctgtctccccctttgggatgctgggaatgtcgggtggtttcatggacatgtttgggatgatgaatgacatgattggaaacatggaacacatgacagctggaggcaattgccagaccttctcatcttccactgtcatctcctactccaatacgggtgatggtgcccccaaggtctaccaagagacatcagagatgcgctcggcaccaggcgggatccgggagacacggaggactgttcgggattcagacagtggactggagcagatgtccattgggcatcacatccgggacagggctcacatcctccagcgctcccgaaaccatcgcacgggggaccaggaggagcggcaggactatatcaacctggatgagagtgaggccgcagcgtttgatgacgagtggcggcgggagacctcccgattccggcagcagcgtcccctggagtttcggcggcttgagtcctcaggggctgggggacgaagggcggaggggcctccccgcctggccatccagggacctgaggactccccttcccgacagtcccgccgctatgactggtga

SEQ ID NO: 708 - DNA, 993 bp, Homo Sapiens
atggcggatatcatcgcaagactccgggaggacgggatccaaaaacgtgtgatacaggaaggccgaggagagctcccggactttcaagatgggaccaaggccacgttccactaccggacgctgcacagtgacgacgagggcaccgtgctggacgacagccgggctcgtggcaagcccatggagctcatcattggcaagaagttcaagctgcctgtgtgggagaccatcgtgtgcaccatgcgagaaggggagattgcccagttcctctgtgacatcaagcatgtggtcctgtacccgctggtggccaagagtctccgcaacatcgcggtgggcaaggaccccctggagggccagcggcactgctgcggtgttgcacagatgcgtgaacacagctccctgggccatgctgacctggacgccctgcagcagaacccccagcccctcatcttccacatggagatgctgaaggtggagagccctggcacgtaccagcaggacccatgggccatgacagacgaagagaaggcaaaggcagtgccacttatccaccaggagggcaaccggttgtaccgcgaggggcatgtgaaggaggctgctgccaagtactacgatgccattgcctgcctcaagaacctgcagatgaaggaacagcctgggtcccctgaatggatccagctggaccagcagatcacgccgctgctgctcaactactgccagtgcaagctggtggtcgaggagtactacgaggtgctggaccactgctcttccatcctcaacaagtacgacgacaacgtcaaggcctacttcaagcggggcaaggcccacgcggccgtgtggaatgcccaggaggcccaggctgactttgccaaagtgctggagctggacccagccctggcgcctgtggtgagccgagagctgcaggccctggaggcacggatccggcagaaggacgaagaggacaaagcccggttccgggggatcttctcccattga

SEQ ID NO: 709 - DNA, 4551 bp, Homo Sapiens
atggatagtcccccaaagctgactggagagaccctcatcgttcatcacatccccctggtgcactgccaagtcccagacaggcagtgctgtggaggggcaggtggaggtggtgggagcacaagacctaatcccttctgcccacctgagctgggcatcacccagcccgatcaagacctaggacaagctgactccctgctattcagcagcctgcactctgctccaggaggaactgcacggtctatagacagcaccaagagtaggagtcgggatggaagaggccctggagcccccaaacgacacaaccccttcttgctgcaggagggtgtgggtgagccaggacttggtgacctgtatgatgacagcattggtgacagtgccacccagcagtccttccacctgcatggcactggccagcccaactttcatctatcctctttccagctgccaccatctggccccagagtgggcaggccatgggggacaacacgcagtcgggctggagtggtggaagggcaggaacaggagccagtgatgaccttggatactcagcagtgcggcaccagccactgctgccggccagagctggaagcagagactatggagctggatgagtgtgggggacctggtgggagtggcagtgggggtggagccagcgatacctctggcttttcctttgaccaggaatggaagctcagttcagatgaatccccaaggaaccctggatgctccggctcaggggaccagcactgccgctgcagtagcacatccagtcagtccgaggcagctgaccagtccatgggctatgtgagcgactcctcctgcaacagttcagatggtgtgctggtcaccttcagcaccctctacaacaagatgcatggcaccccccgtgccaatctcaactctgccccacagtcctgcagcgactcttccttctgcagccactcagaccctggcgccttctatctggatctgcagccctccccatttgagtctaagatgtcttatgagtcccatcaccctgaaagtggaggaagggaagggggctatggttgccctcatgcctcttctcctgagcttgatgccaactgcaactcctaccgcccacactgtgagccgtgcccagcagtggctgacctcacagcctgcttccaaagccaggcccgtcttgttgtggccacacaaaattactataaacttgtcacctgtgacctatcttcccaatcatccccaagccctgctggctcttccatcactagctgctctgaggaacacaccaagataagtcccccaccaggccctggcccagacccaggccccagccagccctctgagtattacctattccagaagccagaagtccagccagaggaacaagaagcagtgagttcctccacccaagcagcagctgctgtgggccccactgtgcttgagggacaagtatacacgaatacttcaccccccaacctcagcactggacgtcagcgctcccgcagctatgatcgcagcctgcagcgcagccctcctgtccgcctgggctcgctggaacgtatgttgagttgcccagtgcgcttgagtgagggccctgcagccatggccgggcctggctccccacccaggagggtcacctcctttgccgagctggccaagggccggaagaaaactggaggctctggctcgcccccacttcgtgtgagtgttggggactcctcccaggagttctcacccatccaagaagcccagcaagatcggggggccccactggatgagggcacttgctgtagccatagcctgccacccatgcctttggggccaggcatggacctacttggcccagacccaagtccaccctggtccacccaggtctgtcagggaccccactccagtgagatgcctcctgctggcctcagagctactgggcaaggccccctggctcagctgatggatccagggcctgctctcccagggagcccagccaacagccatacccagagggatgcaagagctagagctgacgggggtggcaccgagagccgaccagtccttcgctacagcaaggaacagaggccaaccacactgcccatccagcccttcgtgttccagcaccacttccccaagcagctggccaaggcccgggccctccacagcctttcccagctctacagcctctcaggctgcagccgtacacagcagcctgccccactggctgcccctgctgctcaagtctcagtcccagctccctcaggggaaccgcaggcatccactccccgagccactggcagaggtgccaggaaagctgggtctgagccagagacctctcggccatcgcccctgggcagctactcccccatccggagtgttggcccctttgggcccagcactgactcttctgcctccacttcgtgctcccctcccccagagcagcccacagccacagaaagcctgcccccatggagccactcctgtccttctgctgtccggcctgccacctcccagcagccgcagaaggaggatcagaagatactgaccttgactgagtaccggctccatggaacaggaagcttgccgcctctgggctcctggcgatctggcctcagccgagcagagagcctggcccggggaggtggtgagggcagcatggccaccaggcccagtaatgccaaccacctatcccctcaagccctcaagtggcgggaatacaggaggaagaacccactagggccacctggtttgtcagggagcctagaccgaagatcacaagaagctcggctggcccgaagaaaccctatctttgagttccctggctccctcagtgctgccagccatctgaactgccggctgaatggccaagcagtgaagccgttaccactgacctgccctgacttccaggaccccttttccttgacggagaagcctccagctgagttttgtctgtccccagatggcagctcagaggccatttccattgacctgcttcagaaaaaagggctggtaaaagctgttaacatcgctgtggacctcattgtggctcattttggcacaagccgggatcccggggtgaaggcaaagctgggaaacagttctgtgagccccaatgtgggccacctggttctgaagtacttgtgccctgccgtccgcgccgtgctggaggatgggctcaaggcctttgtactggacgtcatcatcgggcagcgtaagaacatgccatggagtgtggttgaggcttccacacagctaggcccatccaccaaggtcctgcatggcctctacaacaaagtcagccaattcccagagctcaccagtcataccatgcgcttcaacgccttcatcctcggcctgctcaacatccggtccctggagttctggtttaatcacctctataaccacgaagacatcatccagacccactaccagccctggggcttcctgagtgcagctcataccgtgtgtcccggcctctttgaagagctgctgctgctgctacagcccctggccctgctgcccttcagcctcgacttgctgttccagcaccggctgctgcaaagtgggcagcagcagcggcagcacaaggaactgctgcgggtgtcccaggacctgctgctgtctgcccactccacgctgcagctggcccgggcccggggccaggagggccctggagacgtggacagggcagcccaaggggagcgggtgaagggtgtgggtgcctcagaaggtggagaagaggaagaggaagaagaggagacagaagaggtggcagaggcagccgggggctcagggcgtgccaggtgggcccgaggtgggcaggccggctggtggtaccagctcatgcagagctcccaggtctacatcgatggctccattgagggttccaggttccctcgtggtagcagcaacagcagcagcgagaaaaagaaaggggcaggaggtgggggacctccccaggctccaccaccccgagagggagtagtggagggggctgaggcctgccctgcctctgaggaggccctgggccgggaaaggggctggcccttctggatggggagcccccctgactctgtgctggccgagctgaggcgcagtcgggagagggaagggcccgctgcctcgccagcagaaaatgaggaaggggcctcagagccttcacctggaggcatcaagtggggacacctctttggctcccgaaaagcccagcgggaggcccggcccacaaataggctcccctcggactggctgagcctggacaagtccatgttccaactagtggcgcagacagtgggttcccgccgggagccagagcccaaggagagcctgcaggagccacactccccagccctgccctccagtcctccgtgtgaggtgcaggcactgtgccaccacctggccaccggccctggacagctgagcttccacaaaggagacatcctacgagtgctggggcgagctggaggagactggctgcgctgcagccgtggccccgactctggcctggtgcccctggcctacgtgacattgaccccaactccaagtccaacccctggaagcagccaaaactga

SEQ ID NO: 710 - DNA, 7074 bp, Homo Sapiens
atgcagccaccgccccagacggtcccgtctggcatggctgggccacctccagccgggaatcctcggagcgtgttctgggctagcagcccttacaggagacgggctaataataatgcagcagtggctccgacaacttgcccgttgcagccggtcacggatccatttgcttttagtagacaggcgctccaaagtacaccactgggcagttcgtccaaaagcagtccacctgtcttgcaaggcccagcccccgcagggttttctcagcaccccggtttgcttgttcctcacacacatgccagagatagctctcagggaccctgtgagcccctgcctggacctctgacacagcccagagcacatgccagtccgttttctggtgcattgacaccttcagcacctcctgggcctgagatgaacaggagtgcagaggtcggtcccagttcagagcctgaagttcagactctgccatatcttcctcactacattccaggagtggatcctgaaacgtctcatgggggccaccctcatgggaacatgcctgggctcgaccgacccctgagcaggcaaaacccacatgacggtgtggtcaccccagcagcatccccttccctccctcagcctggtctgcagatgccaggacagtgggggccagtgcagggaggcccacagccctcggggcaacatcgttcaccctgccctgaaggacctgttcccagcggggtgccctgtgccaccagcgttcctcatttccccaccccgtccatcctacatcagggccctggtcatgagcaacacagccctctggtggctcccccagcagccttgcccagtgacggaagagacgaggtgagccacttgcaaagtggaagccacctggccaataactctgatcctgaaagtacattcaggcaaaatcccagaattgtgaatcactgggcaagcccagagctcaggcagaatccaggagtgaagaatgagcaccggcccgcctctgctcttgtgaaccccctcgcccggggagatagcccagaaaaccgtacgcaccacccactgggggctggggccgggtctggctgtgccccgctagaagcagactcaggagcttcaggagctctggcgatgtttttccaagggggagagacagaaaatgaggagaatctctcatctgaaaaagcaggcttatctggtcaagcggactttgacgatttctgctccagccctgggctaggccgtccgcccgcacctacacacgtgggggcaggcagcctctgccaggcccttctcccaggccccagcaatgaggctgctggtgatgtgtggggtgacacagcgagcacaggggtgccggatgccagcggctcgcagtatgagaatgttgagaacttagaatttgttcagaatcaagaagttctgccaagtgagcccctcaatttggacccttcctccccgagtgaccagttcagatatgggccccttcctgggccagctgtgcccaggcatggtgctgtgtgccacaccggagcccctgatgccacactgcatacagtgcaccctgacagcgtgtcatccagctatagcagcagaagccacggaaggctctcaggctcagccaggccccaggagctggttggcacattcattcagcaagaagttggaaaacccgaggatgaagcttcaggtagtttttttaagcaaatcgattcttctcccgtaggaggtgaaacagacgagaccactgtgagccagaattaccgtggcagcgtgtcccagccctcaaccccgagccccccgaaacctacaggaatatttcagacaagtgcaaatagttctttcgaaccggtaaaatctcacttagttggggtaaaaccatttgaggcagatcgcgccaacgtggttggtgaagtaagggagacctgtgtccgccagaagcagtgcagaccagctgccgccctgcccgatgcttcccctggcaacctggagcagccaccagacaacatggagaccctctgtgcaccccaggtctgtcccctgcctcttaactccaccacggaagctgtgcacatgcttccgcacgcaggggcaccgcccttggatactgtgtatccagcacccgagaagaggccttcagccaggacccaggggcccgtgaagtgtgagagcccagcaacgactctgtgggcgcaaagtgagctgccagattttggaggcaacgtccttctggcccctgcagccccggcgctttatgtgtgtgcaaaacctcagccacctgttgttcagcctccagaagaggcgatgtccgggcagcagtcacggaacccaagctcggcggccccggtgcagagccgaggtggcattggtgcttctgagaaccttgagaatcctcccaaaatgggagaggaggaggcccttcagtcccaggcgagttctggttatgcaagtttattatcctcaccgcccactgagtctctgcagaatcctccagtcttgattgctcagcctgatcacagctataatctggctcagcccattaacttttctgtgtccttatcgaactctcatgagaagaatcagtcctggagagaggctttggtgggggatagacctgcagtcagcagttgggctctcggtggtgattctggggagaacacttctttgtctgggattccaaccagctctgtccttagcttgtctctgcctagcagtgttgcccaaagtaattttccacaaggttctggtgcttccgaaatggtttctaatcagcctgctaatttgctggttcaaccaccatcccagccagttccagagaacttggttccagaaagtcaaaaggatcgtaaggcaggaagtgctcttcccggatttgctaatagccctgctggaagcacaagtgtggtgttagttccacctgcacacggcaccctggtgcctgatggtaataaggcaaaccattccagtcatcaggaagacacttacggagccctagactttaccttaagcaggactttggaaaatcctgtaaacgtgtacaacccgtcccattctgacagcctcgcttctcagcaaagtgttgccagtcatcccagacaatctgggcctggggcgcctaaccttgaccgtttttatcagcaggtcacgaaagatgcccagggccagcctggcctcgaaagagcccagcaggagctggtgccaccccagcaacaggcttctcccccacaactacccaaagccatgttttcggagctgtcaaatccagaaagtctgcccgcacagggacaggcccagaactcagcacagtcaccagcaagtctggttctggtcgacgcgggtcagcagctgccccctcggcctcctcagtcctctagcgtgtctctggtgtccagtggctccggccaggcagctgtgccgtcagagcagccgtggccacagccagtgcctgcacttgcccccggcccaccgcctcaggacctggccgcctactactactaccggcctttgtacgatgcctaccagcctcagtactctttgccgtacccaccggagcctggcgcagcctccctctattaccaggatgtctacagcctctatgagcctcgatacaggccctatgatggtgctgcgtctgcttacgcccagaactaccgctatcccgagcccgagcggcccagctcccgagccagccactcctcggaacggccacctcccaggcaaggatatcctgaaggatactatagttccaaaagtggatggagcagtcagagcgattactatgcaagctattactccagccagtacgattatggagatccaggtcactgggatcgttaccactacagtgctagagtcagggacccccgcacctatgaccggaggtattggtgtgatgcagagtatgacgcatacaggagagagcactctgccttcggggacaggcccgagaaacgtgacaacaactggaggtacgatcctcgcttcacggggagttttgacgatgaccccgatccgcacagagacccttatggggaagaggtggaccggcgcagcgtccacagcgagcactcggcacggagcctgcacagcgcacacagcctggccagccgccgcagcagcctcagctcccactcgcaccagagtcagatttacagaagccacaatgtggctgccggttcctacgaggccccgcttcctccaggctcctttcacggcgattttgcctacggcacctaccgcagcaatttcagcagtggccccggcttcccagagtatggctaccctgccgacaccgtctggcctgccatggagcaagtttcatcaagaccaacttctcctgaaaaattttcagtgcctcatgtctgtgccaggtttggccctggcggtcagcttatcaaagtgattcccaatctgccttcagaaggacagccggccttggtggaggtccacagcatggaggccttgctgcagcacacgtctgagcaggaggagatgcgggcgttcccgggacccctggccaaagacgacacccataaggtggatgtcattaattttgcacagaacaaagctatgaaatgtttgcagaatgaaaacttaattgacaaagagtctgcaagtcttctttggaattttattgttctcttatgcagacaaaatgggaccgtggtagggaccgacattgcggagcttctgttacgagaccacagaacagtgtggcttcctgggaagtcgcccaatgaagcaaacctgattgatttcacgaatgaggcagtggagcaggtggaagaggaggagtctggtgaggcccagctctctttcctcactggtggtccggcggctgccgccagctcgctcgagagagagaccgagaggttcagggagctgttgctgtatggccgtaagaaggatgctttggagtctgcaatgaagaatggcctgtggggtcacgctctgctacttgcaagtaagatggacagccggacacacgcccgagtcatgaccaggtttgctaacagcctcccaatcaacgaccctctgcagacagtctaccagctcatgtccggacggatgcctgccgcgtccacgtgctgtggagacgagaaatggggagattggaggccgcacctcgccatggtcttgtccaacttgaacaacaacatggacgtcgagtccaggacgatggctaccatgggcgacactctggcttcaaggggcctcttggatgcggcccacttctgctacctcatggcccaggcgggatttggtgtttacacgaagaaaactacaaagcttgtcttaatcggatccaatcacagtttgccattcttaaagttcgcaaccaacgaagcaatccagaggacggaagcctatgagtacgcccagtccctgggtgccgagacctgccccctgcctagtttccaggtgtttaagttcatctactcctgccgcctggcggaaatggggctggccacgcaagccttccactactgtgaggccatcgcgaagagcatcctgacgcagccgcacctgtattccccggtgttgatcagccagcttgtgcagatggcttcccagttacgactcttcgatccccagctgaaagagaagccagaagaggagtccttggccgcacccacgtggctggttcacctgcagcaggtggagcggcagattaaggagggggctggagtatggcatcaggatggagccctcccgcagcagtgtcctggcactccgagttccgagatggagcagttggacaggccaggactcagtcagccaggagccctggggatcgccaaccctctgctggcggtgcctgcaccgagccctgagcactcgagcccgagcgtgcggctgctgccctcagctccgcagacgctccctgacggcccattggccagtcctgccagagtgccgatgttcccagtgccactgcccccggggcccctggagccgggtcctggctgtgtgaccccagggcctgcacttggcttcctggagccctccgggcctggcctcccacctggtgtgccacctctgcaggaaaggagacacttgctccaggaagccaggagcccagacccagggatagtgccgcaggaggcgcctgttggaaactcactttccgagctaagcgaagaaaattttgatggaaaatttgctaatctgaccccctcgaggacggtgccagactcggaggcccccccagggtgggatcgtgccgactcgggtcccacgcagccacctctgtctctctcacccgctcccgaaacaaagagacccggacaggcagccaagaaagaaacgaaggaacctaagaagggtgaatcctggttctttcgttggctacctggaaagaaaaagacagaagcttatttgccagatgacaagaacaaatcgattgtttgggatgaaaagaaaaaccagtgggtgaatttaaatgagccagaagaggagaagaaagccccgcccccacctccaacctcgatgcccaagactgtgcaagctgccccgcctgccctcccagggcctcctggagcccccgtgaacatgtactctagaagagcagcaggaaccagagctcgctacgttgacgtcctgaacccaagcgggacccagcggagcgagccggctctcgctcctgcggactttgtcgctccactcgcgccactcccaattccttctaacttgttcgtgccaaccccagatgcagaagaaccacagcttccagacgggactggcagggaagggcctgcagcagctaggggcctggccaatccagagcctgccccagagcccaaggttttaagctctgcagcgtcactccctggctctgaactcccctcctccaggcctgagggttcccagggaggagagctttcgcgctgtagttcaatgagttcattatcacgtgaagtgagccagcattttaatcaggctcctggcgacctccctgctgcagggggccctcccagcggggccatgcccttctacaaccctgctcagctggcacaggcctgcgccacctccgggagctcaaggctagggaggattggccagaggaagcacctggtgctgaactag

SEQ ID NO: 711 - DNA, 972 bp, Homo Sapiens
atggccgcggagctgagcatggggccagagctgcccaccagcccgctggccatggagtatgtcaacgacttcgacctgctcaagttcgacgtgaagaaggagccactggggcgcgcggagcgtccgggcaggccctgcacacgcctgcagccagccggctcggtgtcctccacaccgctcagcactccgtgtagctccgtgccctcgtcgcccagcttcagcccgaccgaacagaagacacacctcgaggatctgtactggatggcgagcaactaccagcagatgaaccccgaggcgctcaacctgacgcccgaggacgcggtggaagcgctcatcggctcgcacccagtgccacagccgctgcaaagcttcgacagctttcgcggcgctcaccaccaccaccatcaccaccaccctcacccgcaccacgcgtacccgggcgccggcgtggcccacgacgagctgggcccgcacgctcacccgcaccatcaccatcatcaccaagcgtcgccgccgccgtccagcgccgctagcccggcgcaacagctgcccactagccaccccgggcccgggccgcacgcgacggcctcggcgacggcggcgggcggcaacggcagcgtggaggaccgcttctccgacgaccagctcgtgtccatgtccgtgcgcgagctgaaccgccacctgcggggcttcaccaaggacgaggtgatccgcctgaagcagaagcggcggaccctgaagaaccggggctacgcccagtcttgcaggtataaacgcgtccagcagaagcaccacctggagaatgagaagacgcagctcattcagcaggtggagcagcttaagcaggaggtgtcccggctggcccgcgagagagacgcctacaaggtcaagtgcgagaaactcgccaactccggcttcagggaggcgggctccaccagcgacagcccctcctctcccgagttctttctgtga

SEQ ID NO: 712 - DNA, 2256 bp, Homo Sapiens
atggcattccggacaatttgcgtgttggttggagtatttatttgttctatctgtgtgaaaggatcttcccagccccaagcaagagtttatttaacatttgatgaacttcgagaaaccaagacctctgaatacttcagcctttcccaccatcctttagactacaggattttattaatggatgaagatcaggaccggatatatgtgggaagcaaagatcacattctttccctgaatattaacaatataagtcaagaagctttgagtgttttctggccagcatctacaatcaaagttgaagaatgcaaaatggctggcaaagatcccacacacggctgtgggaactttgtccgtgtaattcagactttcaatcgcacacatttgtatgtctgtgggagtggcgctttcagtcctgtctgtacttacttgaacagagggaggagatcagaggaccaagttttcatgattgactccaagtgtgaatctggaaaaggacgctgctctttcaaccccaacgtgaacacggtgtctgttatgatcaatgaggagcttttctctggaatgtatatagatttcatggggacagatgctgctatttttcgaagtttaaccaagaggaatgcggtcagaactgatcaacataattccaaatggctaagtgaacctatgtttgtagatgcacatgtcatcccagatggtactgatccaaatgatgctaaggtgtacttcttcttcaaagaaaaactgactgacaataacaggagcacgaaacagattcattccatgattgctcgaatatgtcctaatgacactggtggactgcgtagccttgtcaacaagtggaccactttcttaaaggcgaggctggtgtgctcggtaacagatgaagacggcccagaaacacactttgatgaattagaggatgtgtttctgctggaaactgataacccgaggacaacactagtgtatggcatttttacaacatcaagctcagttttcaaaggatcagccgtgtgtgtgtatcatttatctgatatacagactgtgtttaatgggccttttgcccacaaagaagggcccaatcatcagctgatttcctatcagggcagaattccatatcctcgccctggaacttgtccaggaggagcatttacacccaatatgcgaaccaccaaggagttcccagatgatgttgtcacttttattcggaaccatcctctcatgtacaattccatctacccaatccacaaaaggcctttgattgttcgtattggcactgactacaagtatacaaagatagctgtggatcgagtgaacgctgctgatgggagataccatgtcctgtttctcggaacagatcggggtactgtgcaaaaagtggttgttcttcctactaacaactctgtcagtggcgagctcattctggaggagctggaagtctttaagaatcatgctcctataacaacaatgaaaatttcatctaaaaagcaacagttgtatgtgagttccaatgaaggggtttcccaggtatctctgcaccgctgccacatctatggtacagcctgtgctgactgctgcctggcgcgggacccttattgcgcctgggatggccattcctgttccagattctacccaactgggaaacggaggagccgaagacaagatgtgagacatggaaacccactgactcaatgcagaggatttaatctaaaagcatacagaaatgcagctgaaattgtgcagtatggagtaaaaaataacaccacttttctggagtgtgcccccaagtctccgcaggcatctatcaagtggctgttacagaaagacaaagacaggaggaaagaggttaagctgaatgaacgaataatagccacttcacagggactcctgatccgctctgttcagggttctgaccaaggactttatcactgcattgctacagaaaatagtttcaagcagaccatagccaagatcaacttcaaagttttagattcagaaatggtggctgttgtgacggacaaatggtccccatggacctgggccagctctgtgagggctttacccttccacccgaaggacatcatgggggcattcagccactcagaaatgcagatgattaaccaatattgcaaagacactcggcagcaacatcagcagggagatgaatcacagaaaatgagaggggactatggcaagttaaaggccctcatcaatagtcggaaaagtagaaacaggaggaatcagttgccagagtcataa

SEQ ID NO: 713 - DNA, 2235 bp, Homo Sapiens
atggcaaagagggaggacagccctggcccagaggtccagccaatggacaagcagttcctggtatgcagcatctgcctggatcggtaccagtgccccaaggttcttccttgcctgcacaccttctgtgagagatgtctccaaaactatatccctgcccagagcctgacgctatcctgtccagtatgccggcagacgtccatcctcccagagcagggcgtctcggcactgcagaacaacttcttcatcagcagcctcatggaggcaatgcagcaggcacctgatggggcccacgacccggaggacccccaccccctcagtgtagtggctggccgccctctctcctgccccaaccatgaaggcaagacgatggagttttactgtgaggcctgtgagacggccatgtgtggtgagtgccgcgccggggagcatcgtgagcatggcacagtgctgctgagggatgtggtggagcagcacaaggcggccctgcagcgccagctcgaggctgtgcgtggccgattgccacagctgtccgcagcaattgccttagtcgggggcatcagccagcagctgcaggagcgcaaggcagaggccctggcccagatcagtgcagcgttcgaggacctggagcaagcactgcagcagcgcaagcaggctctggtcagcgacctggagaccatttgtggggccaaacagaaggtgttgcaaagccagctggacacactgcgccagggtcaggaacacatcggcagtagctgcagctttgcagagcaggcactgcgcctgggctcggccccggaggtgttgctggtgcgcaagcacatgcgagagcggctggctgcattggcggcacaggccttcccggagcggccacatgagaatgcacagctggaactggtccttgaggtggacggtctgcggcgatcggtgctcaatctgggcgcactgctcaccacgagcgccactgcacacgaaacggtggccacgggagagggcctgcgccaggcgctagtgggccagcctgcctcgctcactgtcactaccaaagacaaggacgggcggttggtgcgcacaggcagcgctgagctgcgtgcagagatcaccggcccggacggcacgcgccttccggtgccagtggtggaccacaagaatggcacatatgagctagtgtacacagcgcgcacggaaggcgagctgctcctctcggtgctgctctacggacagccagtgcgcggcagccccttccgcgtgcgtgccctgcgtccgggggacctgccaccttccccggacgatgtgaagcgccgtgtcaagtcccctggcggccccggcagccatgtgcgccagaaggcagtgcgtaggcccagctccatgtacagcacaggcggcaaacgaaaggacaacccaattgaggatgagctcgtcttccgtgttggcagtcgtggaagggagaaaggtgaattcaccaatttacaaggtgtgtccgcagccagcagcggccgcatcgtggtagcagacagcaacaaccagtgtattcaggttttctccaatgagggccagttcaagttccgttttggggtccgaggacgctcacctgggcagctgcagcgccccacaggtgtggcagtggacaccaatggagacataattgtggcagactatgacaaccgttgggtcagcatcttctcccctgagggcaagttcaagaccaagattggagctggccgcctcatgggccccaagggagtggccgtagaccggaatggacatatcattgtggtcgacaacaagtcttgctgcgtctttaccttccagcccaatggcaaactggttggccgttttgggggccgtggggccactgaccgccactttgcagggccccattttgtggctgtgaacaacaagaatgaaattgtagtaacggacttccataaccattcagtgaaggtgtacagtgccgatggagagttcctcttcaagtttggctcccatggcgagggcaatgggcagttcaatgcccccacaggagtagctgtggactccaatggaaacatcattgtggctgactggggcaacagccgcatccaggtattcgacagctctggctccttcctgtcctatatcaacacatctgcagaaccactgtatggtccacagggcctggcactgacctcggatggccatgtggtggtggctgatgctggcaaccactgctttaaagcctatcgctacctccagtag

SEQ ID NO: 714 - DNA, 3984 bp, Homo Sapiens
atggaggctccgctgcaaactggaatggtgcttggcgtgatgatcggggccggagtggcggtggtggtcacggccgtgctcatcctcctggtggtgcggaggctgcgagtgccaaaaaccccagccccggatggcccccggtatcggttccggaagagggacaaagtgctcttctatggccggaagattatgcggaaggtgtcacaatccacctcctccctcgtggatacctctgtctccgccacctcccggccacgcatgaggaagaaactgaagatgctcaacattgccaagaagatcctgcgcatccagaaagagacgcccacgctgcagcggaaggagcccccgcccgcagtgctagaagctgacctgaccgagggcgacctggctaactcccatctgccctctgaagtgctttatatgctcaagaacgtccgggtgctgggccacttcgagaagccactcttcctggagctctgccgccacatggtcttccagcggctgggccagggtgactacgtcttccggccgggccagccagatgccagcatctacgtggtgcaggacgggctgctggagctctgtctgccagggcctgacgggaaggagtgtgtggtgaaggaagtggttcctggggacagcgtcaacagccttctcagcatcctggatgtcatcaccggtcaccagcatccccagcggaccgtgtctgcccgggcggcccgggactccacggtgctgcgcctgccggtggaagcattctccgcggtcttcaccaagtacccggagagcttggtgcgggtcgtgcagatcatcatggtgcggctgcagcgagtcaccttcctggcactgcacaactacctgggtctgaccaatgagctcttcagccacgagatccagcccctgcgtctgttccccagccccggcctcccaactcgcaccagccctgtgcggggctccaagagaatggtcagcacctcagctacagacgagcccagggagaccccagggcggccacccgatcccaccggggccccgctgcctggacctacaggggaccctgtgaagcccacatccctggaaaccccctcggcccctctgctgagccgctgcgtctccatgccaggggacatctcaggcttgcagggtggcccccgctccgacttcgacatggcctatgagcgtggccggatctccgtgtccctgcaggaagaggcctccggggggtccctggcagcccccgctcggacccccactcaggagcctcgtgagcagccggcaggcgcctgtgaatacagctactgtgaggatgagtcggccactggtggctgccctttcgggccctaccagggccgccagaccagcagcatcttcgaggcagcaaagcaggagctggccaagctgatgcggattgaggacccctccctcctgaacagcagagtcttgctgcaccacgccaaagctggcaccatcattgcccgccagggagaccaggacgtgagcctgcacttcgtgctctggggctgcctgcacgtgtaccagcgcatgatcgacaaggcggaggacgtgtgcctgttcgtagcgcagcccggggaactggtggggcagctggcggtgctcactggcgaacctctcatcttcacactgcgagcccaacgcgactgcaccttcctgcggatctccaagtccgacttctatgagatcatgcgcgcacagcccagtgtggtgctgagtgcggcgcacacggtggcagccaggatgtcgcccttcgtgcgccagatggacttcgccatcgactggactgcagtggaggcgggacgcgcgctgtacaggcagggcgaccgctccgactgcacttacatcgtgctcaatgggcggctgcgtagcgtgatccagcgaggcagtggcaagaaggagctggtgggcgagtacggccgcggcgacctcatcggcgtggtggaggcactgacccggcagccgcgagccacgacggtgcacgcggtgcgcgacacggagctggccaagcttcccgagggcaccttgggtcacatcaaacgccggtacccgcaggtcgtgacccgccttatccacctactgagccagaaaattctagggaatttgcagcagctgcaaggacccttcccagcaggctctgggttgggtgtgcccccacactcggaactcaccaacccagccagcaacctggcaactgtggcaatcctgcctgtgtgtgctgaggtccccatggtggccttcacgctggagctgcagcacgccctgcaggccatcggtccgacgctactccttaacagtgacatcatccgggcacgcctgggggcctccgcactggatagcatccaagagttccggctgtcagggtggctggcccagcaggaggatgcacaccgtatcgtactctaccagacggacgcctcgctgacgccctggaccgtgcgctgcctgcgacaggccgactgcatcctcattgtgggcctgggggaccaggagcctaccctcggccagctggagcagatgctggagaacacggctgtgcgcgcccttaagcagctagtcctgctccaccgagaggagggcgcgggccccacgcgcaccgtggagtggctaaatatgcgcagctggtgctcggggcacctgcacctgcgctgtccgcgccgcctcttttcgcgccgcagccctgccaagctgcatgagctctacgagaaggttttctccaggcgcgcggaccggcacagcgacttctcccgcttggcgagggtgctcacggggaacaccattgcccttgtgctaggcgggggcggggccaggggctgctcgcacatcggagtactaaaggcattagaggaggcgggggtccccgtggacctggtgggcggcacgtccattggctctttcatcggagcgttgtacgcggaggagcgcagcgccagccgcacgaagcagcgggcccgggagtgggccaagagcatgacttcggtgctggaacctgtgttggacctcacgtacccagtcacctccatgttcactgggtctgcctttaaccgcagcatccatcgggtcttccaggataagcagattgaggacctgtggctgccttacttcaacgtgaccacagatatcaccgcctcagccatgcgagtccacaaagatggctccctgtggcggtacgtgcgcgccagcatgacgctgtcgggctacctgcccccgctgtgcgaccccaaggacgggcacctactcatggatggcggctacatcaacaatctgccagcggacatcgcccgcagcatgggtgccaaaacggtcatcgccattgacgtggggagccaggatgagacggacctcagcacctacggggacagcctgtccggctggtggctgctgtggaagcggctgaatccctgggctgacaaggtaaaggttccagacatggctgaaatccagtcccgcctggcctacgtgtcctgtgtgcggcagctagaggttgtcaagtccagctcctactgcgagtacctgcgcccgcccatcgactgcttcaagaccatggactttgggaagttcgaccagatctatgatgtgggctaccagtacgggaaggcggtgtttggaggctggagccgtggcaacgtcattgagaaaatgctcacagaccggcggtctacagaccttaatgagagccgccgtgcagacgtgcttgccttcccaagctctggcttcactgacttggcagagattgtgtcccggattgagccccccacgagctatgtctctgatggctgtgctgacggagaggagtcagattgtctgacagagtatgaggaggacgccggacccgactgctcgagggatgaaggggggtcccccgagggcgcaagccccagcactgcctccgagatggaggaggagaagtcgattctccggcaacgacgctgtctgccccaggagccgcccggctcagccacagatgcctga

SEQ ID NO: 715 - DNA, 426 bp, Homo Sapiens
atgtcctctcctccccacagtggacagacggtccaccccccgtgcagttccaagctcagaatggacccaacacccgcctggccagcctcctgtgaggccttgatggggccatccagctccgcagggcctgcgcgtctccggcttccacccagacggcactcaagcctgcccccgaggcgtgcttccttcctgattgtctctagagcttccaagtcctgggaatgtgcggggccagtccctgccctcccaggaggggtggtagccgttcccacctcgcagcaggacccccagtgcagaggctcacaggtggcacacaggcgctgtctctccagagccatccttcagagtggacctcagtgccagtcctgcctcagcaactgggtcacgtcggccaggaatagggcgcaggcctccagcaggtcctaa

SEQ ID NO: 716 - DNA, 858 bp, Homo Sapiens
atggccgggctcggccaccccgccgccttcggccgggccacccacgccgtggtgcgggcgctacccgagtcgctcggccagcacgcgctgagaagcgccaagggcgaggaggtggacgtcgcccgcgcggaacggcagcaccagctctacgtgggcgtgctgggcagcaagctggggctgcaggtggtggagctgccggccgacgagagccttccggactgcgtcttcgtggaggacgtggccgtggtgtgcgaggagacggccctcatcacccgacccggggcgccgagccggaggaaggaggttgacatgatgaaagaagcattagaaaaacttcagctcaatatagtagagatgaaagatgaaaatgcaactttagatggcggagatgttttattcacaggcagagaattttttgtgggcctttccaaaaggacaaatcaacgaggtgctgaaatcttggctgatacttttaaggactatgcagtctccacagtgccagtggcagatgggttgcatttgaagagtttctgcagcatggctgggcctaacctgatcgcaattgggtctagtgaatctgcacagaaggcccttaagatcatgcaacagatgagtgaccaccgctacgacaaactcactgtgcctgatgacatagcagcaaactgtatatatctaaatatccccaacaaagggcacgtcttgctgcaccgaaccccggaagagtatccagaaagtgcaaaggtttatgagaaactgaaggaccatatgctgatccccgtgagcatgtctgaactggaaaaggtggatgggctgctcacctgctgctcagttttaattaacaagaaagtagactcctga

SEQ ID NO: 717 - DNA, 1449 bp, Homo Sapiens
atggcggaggctgcaactcccggaacaacagccacaacatcaggagcaggagcggcagcggcgacggcggcagcagcctcccccaccccgatccccacagtcaccgccccgtccctgggggcgggcggagggggcggcggcagcgacggcagcggcggcggctggactaaacaggtcacctgcaggtattttatgcatggggtttgtaaggaaggagacaactgtcgctactcgcatgacctctctgacagtccgtatagtgtagtgtgcaagtattttcagcgagggtactgtatttatggagaccgctgcagatatgaacatagcaaaccattgaaacaggaagaagcaactgctacagagctaactacaaagtcatcccttgctgcttcctcaagtctctcatcgatagttggaccacttgttgaaatgaatacaggcgaagctgagtcaagaaattcaaactttgcaactgtaggagcaggttcagaggactgggtgaatgctattgagtttgttcctgggcaaccctactgtggccgtactgcgccttcctgcactgaagcacccctgcagggctcagtgaccaaggaagaatcagagaaagagcaaaccgccgtggagacaaagaagcagctgtgcccctatgctgcagtgggagagtgccgatacggggagaactgtgtgtatctccacggagattcttgtgacatgtgtgggctgcaggtcctgcatccaatggatgctgcccagagatcgcagcatatcaaatcgtgcattgaggcccatgagaaggacatggagctctcatttgccgtgcagcgcagcaaggacatggtgtgtgggatctgcatggaggtggtctatgagaaagccaaccccagtgagcgccgcttcgggatcctctccaactgcaaccacacctactgtctcaagtgcattcgcaagtggaggagtgctaagcaatttgagagcaagatcataaagtcctgcccagaatgccggatcacatctaactttgtcattccaagtgagtactgggtggaggagaaagaagagaagcagaaactcattctgaaatacaaggaggcaatgagcaacaaggcgtgcaggtattttgatgaaggacgtgggagctgcccatttggagggaactgtttttacaagcatgcgtaccctgatggccgtagagaggagccacagagacagaaagtgggaacatcaagcagataccgggcccaacgaaggaaccacttctgggaactcattgaggaaagagagaacagcaacccctttgacaacgatgaagaagaggttgtcacctttgagctgggcgagatgttgcttatgcttttggctgcaggtggggacgacgaactaacagactctgaagatgagtgggacttgtttcatgatgagctggaagatttttatgacttggatctatag

SEQ ID NO: 718 - DNA, 2295 bp, Homo Sapiens
atgctgctcgatcccaccaaccccagcgccggcactgccaagatagacaagcaggagaaggtcaagctcaactttgacatgacggcatcccccaagatcctgatgagcaagcctgtgctgagtgggggcacaggccgccggatttccttgtcggatatgccgcgctcccccatgagcacaaactcttctgtgcacacgggctccgacgtggagcaggatgctgagaagaaggccacgtcgagccacttcagtgcgagcgaggagtccatggacttcctggataagagcacagcttcaccagcctccaccaagacgggacaagcagggagtttatccggcagcccaaagcccttctctcctcaactgtcagctcctatcacgacgaaaacggacaaaacctccaccaccggcagcatcctgaatcttaacctggatcgaagcaaagctgagatggatttgaaggagctgagcgagtcggtccagcaacagtccacccctgttcctctcatctctcccaagcgccagattcgtagcaggttccagctgaatcttgacaagaccatagagagttgcaaagcacaattaggcataaatgaaatctcggaagatgtctatacggccgtagagcacagcgattcggaggattctgagaagtcagatagtagcgatagtgagtatatcagtgatgatgagcagaagtctaagaacgagccagaagacacagaggacaaagaaggttgtcagatggacaaagagccatctgctgttaaaaaaaagcccaagcctacaaacccagtggagattaaagaggagctgaaaagcacgtcaccagccagcgagaaggcagaccctggagcagtcaaggacaaggccagccctgagcctgagaaggacttttccgaaaaggcaaaaccttcacctcaccccataaaggataaactgaagggaaaagatgagacggattccccaacagtccatttgggcctggactctgattcagagagcgaacttgtcatagatttaggagaagaccattctgggcgggagggtcgaaaaaataagaaggaacccaaagaaccatctcccaaacaggatgttgtaggtaaaactccaccatccacgacggtgggcagccattctcccccggaaacaccggtgctcacccgctcttccgcccaaacttccgcggctggcgccacagccaccaccagcacgtcctccacggtcaccgtcacggccccggcccccgccgccacaggaagcccagtgaaaaagcagaggccgcttttaccgaaggagactgccccggccgtgcagcgggtcgtgtggaactcatcaactgtccagcagaaggagatcacacagagcccatccacgtccaccatcaccctggtgaccagcacacagtcatcggccctggtcaccagctcggggtccatgagcacccttgtgtcctcagtcaacgctgacctgcccatcgccactgcctcagctgatgtcgccgctgatattgccaagtacactagcaaaatgatggatgcaataaaaggaacaatgacagaaatatacaacgatctttctaaaaacactactggaagcacaatagctgagattcgcaggctgaggatcgagatagagaagctccagtggctgcaccagcaagagctctccgaaatgaaacacaacttagagctgaccatggcggagatgcggcagagcctggagcaggagcgggaccggctcatcgccgaggtgaagaagcagctggagttggagaagcagcaggcggtggatgagaccaagaagaagcagtggtgcgccaactgcaagaaggaggccatcttttactgctgttggaacactagctactgtgactacccctgccagcaagcccactggcctgagcacatgaagtcctgcacccagtcagctactgctcctcagcaggaagcggatgctgaggtgaacacagaaacactaaataagtcctcccaggggagctcctcgagcacacaatcagcaccttcagaaacggccagcgcctccaaagagaaggagacgtcagctgagaaaagcaaggagagtggctcgacccttgacctttctggctccagagagacgccctcctccattctcttaggctccaaccaaggctctgaccattcccggagtaataaatccagttggagcagcagtgatgagaagaggggatcgacacgttccgatcacaacaccagtaccagcacgaagagcctcctcccgaaagagtctcggctggacaccttctgggactag

SEQ ID NO: 719 - DNA, 2457 bp, Homo Sapiens
atgttcagccagcagcagcagcagcagctccagcaacagcagcagcagctccagcagttacagcagcagcagctccagcagcagcaattgcagcagcagcagttactgcagctccagcagctgctccagcagtccccaccacaggccccgttgcccatggctgtcagccgggggctccccccgcagcagccacagcagccgcttctgaatctccagggcaccaactcagcctccctcctcaacggctccatgctgcagagagctttgcttttacagcagttgcaaggtaacctccgaggctatggcatggcatccccaggcctcgcagcccccagcctcacacccccacaactggccactccaaatttgcaacagttctttccccaggccactcgccagtccttgctgggacctcctcctgttggggtccccatgaacccttcccagttcaacctttcaggacggaacccccagaaacaggcccggacctcctcctctaccacccccaatcgaaaggattcttcttctcagacaatgcctgtggaagacaagtcagaccccccagaggggtctgaggaagccgcagagccccggatggacacaccagaagaccaagatttaccgccctgcccagaggacatcgccaaggaaaaacgcactccagcacctgagcctgagccttgtgaggcgtccgagctgccagcaaagagattgaggagctcagaagagcccacagagaaggaacctccagggcagttacaggtgaaggcccagccgcaggcccggatgacagtaccgaaacagacacagacaccagacctgctgcctgaggccctggaagcccaagtgctgccacgattccagccacgggtcctgcaggtccaggcccaggtgcagtcacagactcagccgcggataccatccacagacacccaggtgcagccaaagctgcagaagcaggcgcaaacacagacctctccagagcacttagtgctgcaacagaagcaggtgcagccacagctgcagcaggaggcagagccacagaagcaggtgcagccacaggtccacacacaggcacagccaagcgtccagccacaggagcatcctccagcgcaggtgtcagtacagccaccagagcagacccatgagcagcctcacacccagccgcaggtgtcgttgctggctccagagcaaacaccagttgtggttcatgtctgcgggctggagatgccacctgatgcagtagaagctggtggaggcatggaaaagaccttgccagagcctgtgggcacccaagtcagcatggaagagattcagaatgagtcggcctgtggcctagatgtgggagaatgtgaaaacagagcgagagagatgccaggggtatggggcgccgggggctccctgaaggtcaccattctgcagagcagtgacagccgggcctttagcactgtacccctgacacctgtcccccgccccagtgactccgtctcctccacccctgcggctaccagcactccctctaagcaggccctccagttcttctgctacatctgcaaggccagctgctccagccagcaggagttccaggaccacatgtcggagcctcagcaccagcagcggctaggggagatccagcacatgagccaagcctgcctcctgtccctgctgcccgtgccccgggacgtcctggagacagaggatgaggagcctccaccaaggcgctggtgcaacacctgccagctctactacatgggggacctgatccaacaccgcaggacacaggaccacaagattgccaaacaatccttgcgacccttctgcaccgtttgcaaccgctacttcaaaacccctcgcaagtttgtggagcacgtgaagtcccaggggcataaggacaaagccaaggagctgaagtcgcttgagaaagaaattgctggccaagatgaggaccacttcattacagtggacgctgtgggttgcttcgagggtgatgaagaagaggaagaggatgatgaggatgaagaagagatcgaggttgaggaggaactctgcaagcaggtgaggtccagagatatatccagagaggagtggaagggctcggagacctacagccccaatactgcatatggtgtggacttcctggtgcccgtgatgggctatatctgccgcatctgccacaagttctatcacagcaactcaggggcacagctctcccactgcaagtccctgggccactttgagaacctgcagaaatacaaggcggccaagaaccccagccccaccacccgacctgtgagccgccggtgcgcaatcaacgcccggaacgctttgacagccctgttcacctccagcggccgcccaccctcccagcccaacacccaggacaaaacacccagcaaggtgacggctcgaccctcccagcccccactacctcggcgctcaacccgcctcaaaacctga

SEQ ID NO: 720 - DNA, 2250 bp, Homo Sapiens
atgtcaggaagccatacacctgcctgtggccctttctcagccctgactccgagcatatggccccaggagatcttggccaagtacacgcagaaggaagagtcagcagagcaaccagagttctactacgatgagtttggtttccgtgtgtacaaggaagaaggtgatgagcctggctccagtctgctggcgaactcccctctgatggaggatgctccacagaggctgcggtggcaggcccacctggagttcacccataaccacgatgtgggggatctcacctgggacaagattgccgtctccctaccccgctctgagaagctccgctccctggtgctggccggcatcccacatggcatgaggccacagctgtggatgcggctctctggggccctgcagaagaagaggaactctgagctgtcctaccgcgagattgtgaagaacagctccaacgatgagaccatcgctgccaagcagatcgagaaggacctgctccgcaccatgcccagcaacgcctgcttcgccagcatgggtagcatcggggtgccccgcctgcgcagggtgctccgggccctggcctggctctacccagagatcggctactgccagggcaccggcatggtggccgcctgcctcctgctgttcctggaggaggaggacgccttctggatgatgtctgccatcatcgaggacctgctccccgcctcctacttcagcaccaccctgctgggtgtccagactgaccagcgggtcctgcgccacctcattgtccagtacctgcctcgcctggacaagctgctccaggagcatgacattgagctgtccctgatcacactgcactggttcctcacggccttcgccagcgtggtggacatcaagctgctcctgcgcatctgggacctgtttttctacgagggctcccgggtgctgttccagctcacgctgggcatgctgcacctcaaggaggaagagctgatccagtcagagaactcggcctccatcttcaacacgctatcggatatcccgtcgcagatggaggacgcggagctgcttctgggggtggccatgcggctggccggctccctcaccgatgtggccgtggagactcagcgccgcaagcacctggcctatctcattgcagaccagggccagctcctgggggccggcaccctcaccaacctctctcaggttgttcgccgcaggacccagcggaggaagtccaccatcactgctctgctcttcggggaggatgacctggaggcactcaaggccaagaacatcaagcagacggaactggtggctgacctccgggaagccatcctgcgcgtggcacgccacttccagtgcacagaccccaaaaactgcagcgtggagctgactccagactatagcatggagagccaccagcgggaccacgagaactacgtggcgtgctcacgcagccaccggcgccgagccaaggccctgctggactttgagcggcacgacgacgacgagctgggcttccgcaagaacgacatcatcacaatcgtgtctcagaaggacgagcactgctgggtgggggagctcaacggcctgcgaggctggtttccagccaagttcgtggaagtcctggatgagcgcagcaaagagtactccatcgcgggggatgactcggtgacggagggggtcacagacctcgtgcgagggaccctctgcccggcccttaaggccctgttcgaacatggactgaagaagccatccctgcttgggggcgcctgccacccctggctgtttatcgaggaggctgcaggccgggaggtcgagagagactttgcctccgtgtattcccgtctggtgctctgtaagaccttcaggttggatgaagatggcaaagtcctgaccccggaggagctgctctaccgggctgtgcagtctgtgaacgtgacccacgatgcagtgcatgcacaaatggatgtgaagctccgctcactgatctgcgtggggctcaatgagcaggtgctgcacctgtggctggaggtgctctgctccagcctgcccaccgtggagaagtggtaccagccctggtccttcctgcgcagcccgggctgggtccagatcaagtgtgagctccgagtcctctgctgctttgccttcagcctctcccaggactgggagctccctgcgaagagagaggcgcagcagcccctgaaggagggcgtccgggacatgctggtgaagcaccacctcttcagctgggatgtggacgggtga

SEQ ID NO: 721 - DNA, 1383 bp, Homo Sapiens
atgaacttctccgaggtattcaagctctccagcttactctgcaagttctccccggacggcaagtacctggcttcctgtgtccagtaccggttagtggtccgggatgtgaacacccttcagatccttcagctgtacacgtgcctagaccagatccagcacatcgagtggtcggcagactcgctcttcatcctgtgcgccatgtacaagcgagggctggtgcaggtctggtctttagagcagcccgaatggcactgcaaaatagacgagggctcagccgggctggtggcctcgtgctggagcccggacgggcgccacattctcaacaccacggaattccatctgcggataaccgtctggtccttgtgcacaaaatccgtgtcttacatcaaatacccgaaagcttgtctgcagggaatcaccttcaccagggacggccgctacatggcgctggcagaacggcgcgactgcaaagattacgtgagcatcttcgtctgcagtgattggcagctcctgcggcattttgatacggacacccaggatctcacagggattgagtgggccccaaacggctgtgtgctggcagtgtgggacacctgcttggagtacaagattctgctgtactcattggatggccggttgttgtccacgtacagcgcttacgagtggtccctgggcatcaagtctgtggcctggagccccagcagtcagttcctggcagttgggagctatgatggaaaggtgcgcatccttaatcacgtgacttggaaaatgatcacggagtttgggcatcctgcagccattaatgatcccaagatagtggtgtataaggaggccgagaagagcccacagctgggactgggctgcctctccttcccgccgccccgggccggggccggccctctcccgagctcagagagtaaatatgagatcgcctctgtcccagtctccttacagacactgaaacctgttaccgacagagcaaacccgaaaatcggcataggaatgctggcatttagtcctgacagctacttcctggcgacaaggaacgacaacattcccaatgccgtctgggtctgggacattcagaagctgaggctgttcgcggtgctcgagcagctgtccccagtgcgcgcgtttcagcgggacccgcagcagccgcggctggccatctgcacgggaggcagcaggctctacctgtggtccccagcgggccgcatgtcggtgcaggtgcctggggaaggcgactttgcagtgctctctctgtgctggcatttaagcggagactcgatggccctcctcagcaaggatcacttctgcctctgcttcctggagacagaggcagtggtcggcacagcctgcagacagctgggcggccacacgtag

SEQ ID NO: 722 - DNA, 1680 bp, Homo Sapiens
atggcgacggccttgagcgaggaggagctggacaatgaagactattactcgttgctgaacgtgcgcagggaggcctcttctgaagagctgaaagctgcctaccggaggctctgtatgctctaccatccagacaagcacagagacccagagctcaagtcacaggcggaacgactgtttaaccttgttcaccaggcttatgaagtgcttagtgacccccaaaccagggccatctatgatatatatgggaagagaggactggaaatggaaggatgggaggttgtggaaaggaggagaacccctgctgaaattcgagaggagtttgagcggctgcagagagagagagaagagaggagattgcagcagcgaaccaatcccaagggaacgatcagcgttggagtagatgccaccgacctttttgatcgctatgatgaggagtatgaagatgtgtccggcagtagctttccgcagattgaaattaataaaatgcacatatcccagtccattgaggcacccttgacagcgacagacacagccatcctctctggaagcctctcaacccagaatggaaatggaggaggttccattaactttgcgctcagacgagtaacttcggcaaagggatggggagagttggaatttggagctggagacctacaggggcctttgttcggtctcaagctgttccgtaatctcacaccaagatgctttgtgacaacaaactgtgctctgcagttttcatcccgtggaatccgacccggcctgaccactgtcctagctcggaacctagacaagaacaccgtgggctacctgcagtggcgatggggtatccagtcagccatgaacactagcatcgtccgagacactaaaaccagccacttcactgtggccctgcagctgggaatccctcactcctttgcactgatcagctatcagcacaaattccaagatgacgatcagactcgtgtgaaaggatccctcaaagcaggcttctttgggacggtggtggagtacggagctgagaggaagatctccaggcacagcgttttgggtgcagctgtcagcgttggagttccacagggtgtttctctcaaagtcaagctcaacagggccagtcagacatacttcttccctattcacttgacggaccagcttctgcccagcgccatgttctatgccaccgtggggcctctagtggtctactttgccatgcaccgtctgatcatcaaaccatacctcagggctcagaaagagaaggaattggagaagcagagggaaagcgccgccaccgatgtgctgcagaagaagcaagaggcggagtccgctgtccggctgatgcaggaatctgtccgaaggataattgaggcagaagagtccagaatgggcctcatcatcgtcaatgcctggtacgggaagtttgtcaatgacaagagcaggaagagcgagaaggtgaaggtgattgacgtgactgtgcccctgcagtgcctggtgaaggactcgaagctcatcctcacggaggcctccaaggctgggctgcctggcttttatgacccgtgtgtgggggaagagaagaacctgaaagtgctctatcagttccggggcgtcctgcatcaggtgatggtgctggacagtgaggccctccggataccaaagcagtcccacaggatcgatacagatggataa

SEQ ID NO: 723 - DNA, 882 bp, Homo Sapiens
atggggttcccggccgcggcgctgctctgcgcgctgtgctgcggcctcctggccccggctgcccgcgccggctactccgaggagcgctgcagctggaggggcagcggcctcacccaggagcccggcagcgtggggcagctggccctggcctgtgcggagggcgcggttgagtggctgtacccggctggggcgctgcgcctgaccctgggcggccccgatcccagagcgcggcccggcatcgcctgtctgcggccggtgcggcccttcgcgggcgcccaggtcttcgcggagcgcgcagggggcgccctggagctgctgctggccgagggcccgggcccggcagggggccgctgcgtgcgctggggtccccgcgagcgccgggccctcttcctgcaggccacgccgcaccaggacatcagccgccgcgtggccgccttccgctttgagctgcgcgaggacgggcgccccgagctgcccccgcaggcccacggtctcggcgtagacggtgcctgcaggccctgcagcgacgctgagctgctcctggccgcatgcaccagcgacttcgtaattcacgggatcatccatggggtcacccatgacgtggagctgcaggagtctgtcatcactgtggtggccgcccgtgtcctccgccagacaccgccgctgttccaggcggggcgatccggggaccaggggctgacctccattcgtaccccactgcgctgtggcgtccacccgggcccaggcaccttcctcttcatgggctggagccgctttggggaggcccggctgggctgtgccccacgattccaggagttccgccgtgcctacgaggctgcccgtgctgcccacctccacccctgcgaggtggcgctgcactga

SEQ ID NO: 724 - DNA, 504 bp, Homo Sapiens
atgccgaaacgaaagaagcagaatcatcaccagccaccgacacagcagcagcccccgctgcccgagcgggaagagactggagatgaggaggatgggagtcccatcgctcttcacagaggtcctccaggatcaaggggaccactgattccaccactgctgagtctcccacctcctccttggggtagaggcccaattcggagagggcttggccccaggtctagcccatatggtcgtggttggtggggagtcaatgcagaacctccttttccggggccaggccatgggggtcccaccaggggaagctttcacaaggaacagagaaaccctcgaaggctcaaaagctggtctcttatcaagaatacctgcccgcccaaggatgacccccaggttatggaagacaaatccgaccgccctgtctgccgacattttgccaaaaagggccactgtcgatatgaggacctctgtgccttctaccatccaggcgtcaatggacctcctctgtga

SEQ ID NO: 725 - DNA, 495 bp, Homo Sapiens
atggagagcggcgacgaagcggccatcgagaggcaccgcgtccacttgcgctccgccacattgcgcgacgccgtacccgccacactgcatctgctgccctgcgaggttgcggtggacgggcccgccccggtggggcgcttcttcacgcccgccatccgccagggccccgagggactcgaagtgtcgtttcggggccgctgtctacggggagaggaggtggcggtgccgcctggcctcgtgggatacgtgatggtgacagaagagaagaaggtgtcgatggggaagccagaccccttgcgggattccgggactgacgaccaagaggaggagccgctggagcgggacttcgaccgcttcattggagccactgccaacttcagccgcttcaccctgtggggtctggagaccatccctggcccggatgccaaagtgcgtggggccttaacttggcccagccttgcggcagcgattcacgcacaggtgcccgaggactga

SEQ ID NO: 726 - DNA, 1857 bp, Homo Sapiens
atgaggcgggacgtgcgcatcctgttactgggcgaggcccaggtggggaagacgtcgctgatcctgtccctggtgggcgaggagttccccgaggaggtccctccccgcgcggaggagatcacgatccccgcggacgtcaccccggagaaggtgcccacccacatcgtggactactcagaagccgagcagacggacgaggagctgcgggaggagatccacaaggcaaacgtggtgtgtgtggtgtatgacgtctctgaggaggccaccattgagaagattcgaactaagtggatcccactggtgaatggggggaccacgcaggggcccagggtgcccatcatcctagtgggcaacaagtcagacctgcggtcggggagctccatggaggccgtgctccccatcatgagccagtttcccgagattgagacctgcgtggagtgttcggccaagaacctgaggaacatctcagagctgttctactacgcccagaaggccgtcctgcatcccacagcccccctctatgaccctgaggccaagcagttgaggcccgcgtgcgcccaggcgctgacgcgcatcttcaggctctcagatcaggacctggaccaggcgctcagtgacgaagagctcaacgctttccagaaatcctgctttgggcaccccctggccccgcaggccctggaggacgtgaagacggtggtgtgcaggaacgtggcgggcggcgtgcgggaggaccggctgaccctggatggtttcctcttcctgaacacgctcttcatccagcgcggccggcacgagaccacctggaccatcctgcggcgcttcggctacagcgatgccctggagctgactgcggactatctctcccctctgatccacgtgccccccggctgcagcacggagctcaaccaccttggctaccagtttgtgcagagagtgtttgagaagcacgaccaggaccgcgacggcgccctctcgcccgtggagctgcaaagccttttcagtgtgttcccagcagcgccctggggccccgagctcccacgcacagtccgcacagaggccggccggttgcccctgcacggatacctctgccagtggaccctggtgacctacctggacgtccggagctgccttggacacctaggctacctgggctaccccaccctctgtgagcaggaccaggcccatgccatcacagtcactcgtgagaagaggctggaccaggagaagggacagacgcagcggagcgtcctcctgtgcaaggtggtaggggcccgtggagtgggcaagtctgccttcctgcaggcttttctcggccgcggcctggggcaccaggacacgagggagcagcctcccggctacgccatcgacacggtgcaggtcaatggacaggagaagtacttgatcctctgtgaggtgggcacagatggtctgctggccacatcgctggacgccacctgtgacgttgcctgcttgatgtttgatggcagtgacccaaagtcctttgcacattgtgccagcgtctacaagcaccattacatggacgggcagaccccctgcctctttgtctcctccaaggccgacctgcccgaaggtgtcgcggtgtctggcccatcaccggccgagttttgccgcaagcaccggctacccgctcccgtgccgttctcctgtgctggcccagccgagcccagcaccaccatcttcacccagctcgccaccatggccgccttcccacatttggtccacgcagagctgcatccctcttccttctggctccgggggctgctgggggttgtcggggccgccgtggccgcagtcctcagcttctcactctacagggtcctggtgaagagccagtga

SEQ ID NO: 727 - DNA, 1431 bp, Homo Sapiens
atggtctccaagcgcattgcccaggagacctttgatgcagctgtgcgcgagaacatcgaggagtttgcgatggggccagaggaggcagtgaaagaggccgtggagcagtttgaatcgcaaggggttgatctgagcaacattgtaaagacggcacctaaagtctctgcagacggatcccaggagcccacacatgacatcctgcagatgctcagtgacctccaggagtctgtggccagctctcgcccccaggaggtgtcagcatacctcacccgcttctgcgaccagtgcaaacaggacaaggcctgccgcttcctcgcggcccagaagggggcctaccccatcatcttcactgcctggaagctggccactgcaggtgaccagggccttctgctccagtccctcaatgccctgtcggtgctgactgatggacagccagacctcctggatgcccagggcctgcagctcctagtggccacgctgacccagaatgctgatgaggctgacctgacctgctctgggatccgctgtgtgcgtcacgcttgcctgaaacatgaacagaatcggcaagacctggtgaaagctggcgtgctgcctctgctgactggtgccatcacccatcatggccaccacactgacgtggtcagggaagcctgctgggccctgcgtgtcatgaccttcgatgacgacatccgtgtgccctttggccatgcccacaaccatgccaagatgattgtgcaggagaacaaaggcttgaaggtgctcatcgaagccaccaaagcgttcctggataaccctggcatcctgagcgagctctgtggaaccctgtcccgcctggccattcgcaacgagttctgccaggaggtcgtcgacctcgggggcctgagcattctggtgtccctgctagccgactgcaatgaccaccagatgagggaccagagcggcgttcaggagctcgtgaagcaagtgctgagcaccctgcgagccatcgcaggcaacgacgacgtgaaagatgctattgtccgtgctggtgggacggagtccatcgtggctgctatgacccagcatctgaccagcccccaggtgtgtgagcagagctgcgcggccctgtgcttcctggccctgcgtaagcccgacaacagccgcatcatcgtggagggtggcggggctgtggcagcactgcaggccatgaaggcacacccgcagaaggccggcgtgcagaaacaggcttgcatgctgatccgaaacctggtggcccacggccaggccttctcgaagcccatcctggacctgggggctgaggcactcatcatgcaggcccgatctgcccaccgtgactgtgaggacgtggccaaggccgccctgcgggacctgggttgtcatgtcgagctccgagagctgtggacaggccagaggggcaacctggcgccatga

SEQ ID NO: 728 - DNA, 465 bp, Homo Sapiens
atggcttcagcgtctgctcgtggaaaccaagataaagatgcccattttccaccaccaagcaagcagagcctgttgttttgtccaaaatcaaaactgcacatccacagagcagagatctcaaagattatgcgagaatgtcaggaagaaagtttctggaagagagctctgcctttttctcttgtaagcatgcttgtcacccagggactagtctaccaaggttatttggcagctaattctagatttggatcattgcccaaagttgcacttgctggtctcttgggatttggccttggaaaggtatcatacataggagtatgccagagtaaattccatttttttgaagatcagctccgtggggctggttttggtccacagcataacaggcactgcctccttacctgtgaggaatgcaaaataaagcatggattaagtgagaagggagactctcagccttcagcttcctaa

SEQ ID NO: 729 - DNA, 1092 bp, Homo Sapiens
atggcgcatgtcttacaaaaacccaagcactctgggactcactccatagtccaggagttccaggttccggattatgttccatggcagcagtccaagcaggaaaccaagccatctactctgcctccagtccaacaagccaacagccttcatacaagcaaaatgaagactttgactagggtccaaccagtgtttcacttcaagcccactacggtggtgacaagctgccagccgaagaatccaagagaactacatagaaggcggaagttggaccctgggaagatgcatgccaaaatctggttaatgaagacctcgctcaggagcgggagggccgctctgcgagagctccgaagccgtgagaacttcctcagcaagctcaaccgggagctgatcgagaccatccaggagatggagaacagcacgaccctgcacgtgcgggccctgctgcagcagcaggacaccctggcgaccatcatcgacatcttggagtactcaaacaagaagaggctgcagcaattgaaatctgagcttcaggagtgggaagaaaagaagaaatgcaagatgagctatcttgagcagcaggcagagcagctgaatgccaagattgagaagacccaggaggaagtgaacttcctgagcacttacatggaccatgagtattccatcaagtctgtccagatctccactcttatgcgccagctgcagcaggttaaggacagccagcaggatgagctggatgacctcggtgagatgcgcagaaaggtcctggaatccttgtctgacaagattcagaagaagaagaaaaaaattctgagttctgtggtggcggaaacccagcgtccctatgaagaggctctcctacagaagatgtgggaaagccaggacttcctgaaatgcatgcaaaggttcagagaaattattgaccagtttgaggagaacatgcctgtattaagggccgaggtggaagagctccaagcccagacccgggaaccccgagaggtcatatttgaggatgttctgcttcggagacccaagtgcaccccagacatggatgtcatcctcaacattcctgtggaagagccactacccttctag

SEQ ID NO: 730 - DNA, 2076 bp, Homo Sapiens
atgatgagaaaccacagaattgctagtagtttatgtggagatcaggtcttctccaagaaaaaaaaaaagaaaaaaaaaaacaacatggctgcaaaggagaaactggaggcagtgttaaatgtggccctgagggtgccaagcatcatgctgttggatgtcctgtacagatgggatgtcagctcctttttccagcagatccaaagaagtagccttagtaataaccctcttttccagtataagtatttggctcttaatatgcattatgtaggttatatcttaagtgtggtgctgctaacattgcccaggcagcatctggttcagctttatctatattttttgactgctctgctcctctatgctggacatcaaatttccagggactatgttcggagtgaactggagtttgcctatgagggaccaatgtatttagaacctctctctatgaatcggtttaccacagccttaataggtcagttggtggtgtgtactttatgctcctgtgtcatgaaaacaaagcagatttggctgttttcagctcacatgcttcctctgctagcacgactctgccttgttcctttggagacaattgttatcatcaataaatttgctatgatttttactggattggaagttctctattttcttgggtctaatcttttggtaccttataaccttgctaaatctgcatacagagaattggttcaggtagtggaggtatatggccttctcgccttgggaatgtccctgtggaatcaactggtagtccctgttcttttcatggttttctggctcgtcttatttgctcttcagatttactcctatttcagtactcgagatcagcctgcatcacgtgagaggcttcttttcctttttctgacaagtattgcggaatgctgcagcactccttactctcttttgggtttggtcttcacggtttcttttgttgccttgggtgttctcacactctgcaagttttacttgcagggttatcgagctttcatgaatgatcctgccatgaatcggggcatgacagaaggagtaacgctgttaatcctggcagtgcagactgggctgatagaactgcaggttgttcatcgggcattcttgctcagtattatccttttcattgtcgtagcttctatcctacagtctatgttagaaattgcagatcctattgttttggcactgggagcatctagagacaagagcttgtggaaacacttccgtgctgtaagcctttgtttatttttattggtattccctgcttatatggcttatatgatttgccagtttttccacatggatttttggcttcttatcattatttccagcagcattcttacctctcttcaggttctgggaacactttttatttatgtcttatttatggttgaggaattcagaaaagagccagtggaaaacatggatgatgtcatctactatgtgaatggcacttaccgcctgctggagtttcttgtggccctctgtgtggtggcctatggcgtctcagagaccatctttggagaatggacagtgatgggctcaatgatcatcttcattcattcctactataacgtgtggcttcgggcccagctggggtggaagagctttcttctccgcagggatgctgtgaataagattaaatcgttacccattgctacgaaagagcagcttgagaaacacaatgatatttgtgccatctgttatcaggacatgaaatctgctgtgatcacgccttgcagtcattttttccatgcaggctgtcttaagaaatggctgtatgtccaggagacctgccctctgtgccactgccatctgaaaaactcctcccagcttccaggattaggaactgagccagttctacagcctcatgctggagctgagcaaaacgtcatgtttcaggaaggtactgaacccccaggccaggagcatactccagggaccaggatacaggaaggttccagggacaataatgagtacattgccagacgaccagataaccaggaaggggcttttgaccccaaagaatatcctcacagtgcgaaagatgaagcacatcctgttgaatcagcctag

SEQ ID NO: 731 - DNA, 2961 bp, Homo Sapiens
atgcccggcgtggcccgcctgccgctgctgctcgggctgctgctgctcccgcgtcccggccggccgctggacttggccgactacacctatgacctggcggaggaggacgactcggagcccctcaactacaaagacccctgcaaggcggctgcctttcttggggacattgccctggacgaagaggacctgagggccttccaggtacagcaggctgtggatctcagacggcacacagctcgtaagtcctccatcaaagctgcagttccaggaaacacttctacccccagctgccagagcaccaacgggcagcctcagaggggagcctgtgggagatggagaggtagatcccgtagccggcgggcggcgacgtcccgaccagagcgtgtgtggcccgatggggtcatcccctttgtcattgggggaaacttcactggtagccagagggcagtcttccggcaggccatgaggcactgggagaagcacacctgtgtcaccttcctggagcgcactgacgaggacagctatattgtgttcacctatcgaccttgcgggtgctgctcctacgtgggtcgccgcggcgggggcccccaggccatctccatcggcaagaactgtgacaagttcggcattgtggtccacgagctgggccacgtcgtcggcttctggcacgaacacactcggccagaccgggaccgccacgtttccatcgttcgtgagaacatccagccagggcaggagtataacttcctgaagatggagcctcaggaggtggagtccctgggggagacctatgacttcgacagcatcatgcattacgctcggaacacattctccaggggcatcttcctggataccattgtccccaagtatgaggtgaacggggtgaaacctcccattggccaaaggacacggctcagcaagggggacattgcccaagcccgcaagctttacaagtgcccagcctgtggagagaccctgcaagacagcacaggcaacttctcctcccctgaataccccaatggctactctgctcacatgcactgcgtgtggcgcatctctgtcacacccggggagaagatcatcctgaacttcacgtccctggacctgtaccgcagccgcctgtgctggtacgactatgtggaggtccgagatggcttctggaggaaggcgcccctccgaggccgcttctgcgggtccaaactccctgagcctatcgtctccactgacagccgcctctgggttgaattccgcagcagcagcaattgggttggaaagggcttctttgcagtctacgaagccatctgcgggggtgatgtgaaaaaggactatggccacattcaatcgcccaactacccagacgattaccggcccagcaaagtctgcatctggcggatccaggtgtctgagggcttccacgtgggcctcacattccagtcctttgagattgagcgccacgacagctgtgcctacgactatctggaggtgcgcgacgggcacagtgagagcagcaccctcatcgggcgctactgtggctatgagaagcctgatgacatcaagagcacgtccagccgcctctggctcaagttcgtctctgacgggtccattaacaaagcgggctttgccgtcaactttttcaaagaggtggacgagtgctctcggcccaaccgcgggggctgtgagcagcggtgcctcaacaccctgggcagctacaagtgcagctgtgaccccgggtacgagctggccccagacaagcgccgctgtgaggctgcttgtggcggattcctcaccaagctcaacggctccatcaccagcccgggctggcccaaggagtacccccccaacaagaactgcatctggcagctggtggcccccacccagtaccgcatctccctgcagtttgacttctttgagacagagggcaatgatgtgtgcaagtacgacttcgtggaggtgcgcagtggactcacagctgactccaagctgcatggcaagttctgtggttctgagaagcccgaggtcatcacctcccagtacaacaacatgcgcgtggagttcaagtccgacaacaccgtgtccaaaaagggcttcaaggcccacttcttctcagacaaggacgagtgctccaaggataacggcggctgccagcaggactgcgtcaacacgttcggcagttatgagtgccaatgccgcagtggcttcgtcctccatgacaacaagcacgactgcaaagaagccggctgtgaccacaaggtgacatccaccagtggtaccatcaccagccccaactggcctgacaagtatcccagcaagaaggagtgcacgtgggccatctccagcacccccgggcaccgggtcaagctgaccttcatggagatggacatcgagtcccagcctgagtgtgcctacgaccacctagaggtgttcgacgggcgagacgccaaggcccccgtcctcggccgcttctgtgggagcaagaagcccgagcccgtcctggccacaggcagccgcatgttcctgcgcttctactcagataactcggtccagcgaaagggcttccaggcctcccacgccacagagtgcgggggccaggtacgggcagacgtgaagaccaaggacctttactcccacgcccagtttggcgacaacaactaccctgggggtgtggactgtgagtgggtcattgtggccgaggaaggctacggcgtggagctcgtgttccagacctttgaggtggaggaggagaccgactgcggctatgactacatggagctcttcgacggctacgacagcacagcccccaggctggggcgctactgtggctcagggcctcctgaggaggtgtactcggcgggagattctgtcctggtgaagttccactcggatgacaccatcaccaaaaaaggtttccacctgcgatacaccagcaccaagttccaggacacactccacagcaggaagtga

SEQ ID NO: 732 - DNA, 918 bp, Homo Sapiens
atggagcgtcttgtcgcccgtgggaccttcccagtactagtgcgcaccagcgcctgccgcagcctcttcgggccggtggaccacgaggagctgagccgcgagctgcaggcccgcctggccgagctgaacgccgaggaccagaaccgctgggattacgacttccagcaggacatgccgctgcggggccctggacgcctgcagtggaccgaagtggacagcgactcggtgcccgcgttctaccgcgagacggtgcaggtggggcgctgccgcctgctgctggcgccgcggcccgtcgcggtcgcggtggctgtcagcccgcccctcgagccggccgctgagtccctcgacggcctcgaggaggcgccggagcagctgcctagtgtcccggtcccggccccggcgtccaccccgcccccagtcccggtcctggctccagccccggccccggctccggctccggtcgcggctccggtcgcggctccggtcgcggtcgcggtcctggccccggccccggccccggctccggctccggctccggccccggctccagtcgcggccccggccccagccccggccccggccccggccccggcccccgccccggccccggccccggacgcggcgcctcaagagagcgccgagcagggcgcgaaccaggggcagcgcggccaggagcctctcgctgaccagctgcactcggggatttcgggacgtcccgcggccggcaccgcggccgccagcgccaacggcgcggcgatcaagaagctgtccgggcctctgatctccgatttcttcgccaagcgcaagagatcagcgcctgagaagtcgtcgggcgatgtccccgcgccgtgtccctctccaagcgccgcccctggcgtgggctcggtggagcagaccccgcgcaagaggctgcggtga

SEQ ID NO: 733 - DNA, 1020 bp, Homo Sapiens
atgtggcagctctgggcctccctctgctgcctgctggtgttggccaatgcccggagcaggccctctttccatcccctgtcggatgagctggtcaactatgtcaacaaacggaataccacgtggcaggccgggcacaacttctacaacgtggacatgagctacttgaagaggctatgtggtaccttcctgggtgggcccaagccaccccagagagttatgtttaccgaggacctgaagctgcctgcaagcttcgatgcacgggaacaatggccacagtgtcccaccatcaaagagatcagagaccagggctcctgtggctcctgctgggccttcggggctgtggaagccatctctgaccggatctgcatccacaccaatgcgcacgtcagcgtggaggtgtcggcggaggacctgctcacatgctgtggcagcatgtgtggggacggctgtaatggtggctatcctgctgaagcttggaacttctggacaagaaaaggcctggtttctggtggcctctatgaatcccatgtagggtgcagaccgtactccatccctccctgtgagcaccacgtcaacggctcccggcccccatgcacgggggagggagatacccccaagtgtagcaagatctgtgagcctggctacagcccgacctacaaacaggacaagcactacggatacaattcctacagcgtctccaatagcgagaaggacatcatggccgagatctacaaaaacggccccgtggagggagctttctctgtgtattcggacttcctgctctacaagtcaggagtgtaccaacacgtcaccggagagatgatgggtggccatgccatccgcatcctgggctggggagtggagaatggcacaccctactggctggttgccaactcctggaacactgactggggtgacaatggcttctttaaaatactcagaggacaggatcactgtggaatcgaatcagaagtggtggctggaattccacgcaccgatcagtactgggaaaagatctaa

SEQ ID NO: 734 - DNA, 981 bp, Homo Sapiens
atgtctaatggttatgaagaccacatggccgaagactgcaggggtgacatcgggagaacgaatttgatcgtcaactacctccctcagaacatgacccaggatgagttacgaagcctgttcagcagcattggtgaagttgaatctgcaaaacttattcgggataaagtagcaggacacagcttgggctatggctttgtgaactacgtgaccgcgaaggatgcagagagagcgatcaacacgctgaacggcttgaggctccagtcaaaaaccattaaggtgtcgtatgctcgcccgagctcagaggtgatcaaagacgccaacttgtacatcagcgggctcccgcggaccatgacccagaaggacgtagaagacatgttctctcggtttgggcggatcatcaactcgcgggtcctcgtggatcagactacaggtttgtccagaggggttgcgtttatccggtttgacaaacggtcggaggcagaagaggcaattaccagtttcaatggtcataaacccccaggttcctctgagcccatcacagtgaagtttgcagccaaccccaaccagaacaaaaacgtggcactcctctcgcagctgtaccactcgccagcgcgacggttcggaggccccgttcaccaccaggcgcagagattcaggttctcccccatgggcgtcgatcacatgagcgggctctctggcgtcaacgtgccaggaaacgcctcctccggctggtgcattttcatctacaacctggggcaggatgccgacgaggggatcctctggcagatgtttgggccgtttggtgccgtcaccaatgtgaaagtgatccgcgacttcaacaccaacaagtgcaaagggtttggctttgtgaccatgacaaactatgaagaagccgcgatggccatagccagcctgaacggctaccgcctgggggacaaaatcttacaggtttccttcaaaaccaacaagtcccacaaataa

SEQ ID NO: 735 - DNA, 1215 bp, Homo Sapiens
atggccatggtgaccggcggctggggcggccccggcggcgacacgaacggcgtggacaaggcgggcggctacccgcgcgcggccgaggacgactcggcctcgccccccggtgccgccagcgacgccgagccgggcgacgaggagcggccggggctgcaggtggactgcgtggtgtgcggggacaagtcgagcggcaagcattacggtgtcttcacctgcgagggctgcaagagctttttcaagcgaagcatccgccgcaacctcagctacacctgccggtccaaccgtgactgccagatcgaccagcaccaccggaaccagtgccagtactgccgtctcaagaagtgcttccgggtgggcatgaggaaggaggcggtgcagcgcggccgcatcccgcactcgctgcctggtgccgtggccgcctcctcgggcagccccccgggctcggcgctggcggcagtggcgagcggcggagacctcttcccggggcagccggtgtccgaactgatcgcgcagctgctgcgcgctgagccctaccctgcggcggccggacgcttcggcgcagggggcggcgcggcgggcgcggtgctgggcatcgacaacgtgtgcgagctggcggcgcggctgctcttcagcaccgtggagtgggcgcgccacgcgcccttcttccccgagctgccggtggccgaccaggtggcgctgctgcgcctgagctggagcgagctcttcgtgctgaacgcggcgcaggcggcgctgcccctgcacacggcgccgctactggccgccgccggcctccacgccgcgcctatggccgccgagcgcgccgtggctttcatggaccaggtgcgcgccttccaggagcaggtggacaagctgggccgcctgcaggtcgactcggccgagtatggctgcctcaaggccatcgcgctcttcacgcccgacgcctgtggcctctcagacccggcccacgttgagagcctgcaggagaaggcgcaggtggccctcaccgagtatgtgcgggcgcagtacccgtcccagccccagcgcttcgggcgcctgctgctgcggctccccgccctgcgcgcggtccctgcctccctcatctcccagctgttcttcatgcgcctggtggggaagacgcccattgagacactgatcagagacatgctgctgtcggggagtaccttcaactggccctacggctcgggccagtga

SEQ ID NO: 736 - DNA, 2535 bp, Homo Sapiens
atggggcccggggccccttttgcccgggtggggtggccactgccgcttctggttgtgatggcggcaggggtggctccggtgtgggcctcccactccccccatctcccgcggcctcactcgcgggtccccccgcacccctcctcagaacggcgcgcagtgtacatcggggcactgtttcccatgagcgggggctggccagggggccaggcctgccagcccgcggtggagatggcgctggaggacgtgaatagccgcagggacatcctgccggactatgagctcaagctcatccaccacgacagcaagtgtgatccaggccaagccaccaagtacctatatgagctgctctacaacgaccctatcaagatcatccttatgcctggctgcagctctgtctccacgctggtggctgaggctgctaggatgtggaacctcattgtgctttcctatggctccagctcaccagccctgtcaaaccggcagcgtttccccactttcttccgaacgcacccatcagccacactccacaaccctacccgcgtgaaactctttgaaaagtggggctggaagaagattgctaccatccagcagaccactgaggtcttcacttcgactctggacgacctggaggaacgagtgaaggaggctggaattgagattactttccgccagagtttcttctcagatccagctgtgcccgtcaaaaacctgaagcgccaggatgcccgaatcatcgtgggacttttctatgagactgaagcccggaaagttttttgtgaggtgtacaaggagcgtctctttgggaagaagtacgtctggttcctcattgggtggtatgctgacaattggttcaagatctacgacccttctatcaactgcacagtggatgagatgactgaggcggtggagggccacatcacaactgagattgtcatgctgaatcctgccaatacccgcagcatttccaacatgacatcccaggaatttgtggagaaactaaccaagcgactgaaaagacaccctgaggagacaggaggcttccaggaggcaccgctggcctatgatgccatctgggccttggcactggccctgaacaagacatctggaggaggcggccgttctggtgtgcgcctggaggacttcaactacaacaaccagaccattaccgaccaaatctaccgggcaatgaactcttcgtcctttgagggtgtctctggccatgtggtgtttgatgccagcggctctcggatggcatggacgcttatcgagcagcttcagggtggcagctacaagaagattggctactatgacagcaccaaggatgatctttcctggtccaaaacagataaatggattggagggtcccccccagctgaccagaccctggtcatcaagacattccgcttcctgtcacagaaactctttatctccgtctcagttctctccagcctgggcattgtcctagctgttgtctgtctgtcctttaacatctacaactcacatgtccgttatatccagaactcacagcccaacctgaacaacctgactgctgtgggctgctcactggctttagctgctgtcttccccctggggctcgatggttaccacattgggaggaaccagtttcctttcgtctgccaggcccgcctctggctcctgggcctgggctttagtctgggctacggttccatgttcaccaagatttggtgggtccacacggtcttcacaaagaaggaagaaaagaaggagtggaggaagactctggaaccctggaagctgtatgccacagtgggcctgctggtgggcatggatgtcctcactctcgccatctggcagatcgtggaccctctgcaccggaccattgagacatttgccaaggaggaacctaaggaagatattgacgtctctattctgccccagctggagcattgcagctccaggaagatgaatacatggcttggcattttctatggttacaaggggctgctgctgctgctgggaatcttccttgcttatgagaccaagagtgtgtccactgagaagatcaatgatcaccgggctgtgggcatggctatctacaatgtggcagtcctgtgcctcatcactgctcctgtcaccatgattctgtccagccagcaggatgcagcctttgcctttgcctctcttgccatagttttctcctcctatatcactcttgttgtgctctttgtgcccaagatgcgcaggctgatcacccgaggggaatggcagtcggaggcgcaggacaccatgaagacagggtcatcgaccaacaacaacgaggaggagaagtcccggctgttggagaaggagaaccgtgaactggaaaagatcattgctgagaaagaggagcgtgtctctgaactgcgccatcaactccagtctcggcagcagctccgctcccggcgccacccaccgacacccccagaaccctctgggggcctgcccaggggaccccctgagccccccgaccggcttagctgtgatgggagtcgagtgcatttgctttataagtga

SEQ ID NO: 737 - DNA, 921 bp, Homo Sapiens
atggctctggtctttgagaagtgcgagctggcgacctgcactccccgggaacctggagtggctggcggagacgtctgctcctccgactccttcaacgaggacatcgcggtcttcgccaagcaggttcgcgccgaaaagccacttttttcctcaaatccagagctggacaatttgatgatacaagcaatacaagtactaaggtttcatcttttggagttagaaaaggtccacgaactgtgcgataacttctgccaccgatacattagctgtttgaaggggaaaatgcccatcgacctcgtcattgatgaaagagacggcagctccaagtcagatcatgaagaactttcaggctcctccacaaatctcgctgaccataacccttcttcttggcgagaccacgatgatgcaacctcaacccactcagcaggcaccccagggccctccagtgggggccatgcttcccagagcggagacaacagcagtgagcaaggggatggtttagacaacagtgtagcttcacctggtacaggtgacgatgatgatccggataaggacaaaaaacgccagaagaaaagaggcattttccccaaagtagcaacaaatatcatgagagcatggctcttccagcatctcacacatccgtacccttccgaagagcagaagaaacagttagcgcaagacacaggacttacaattctccaagtaaacaactggtttattaatgccagaagaagaatagtacagcccatgattgaccagtcaaatcgagcagtgagccaaggagcagcatatagtccagagggtcagcccatggggagctttgtgttggatggtcagcaacacatggggatccggcctgcaggacctatgagtggaatgggcatgaatatgggcatggatgggcaatggcactacatgtaa

SEQ ID NO: 738 - DNA, 387 bp, Homo Sapiens
atgactgaggctgatgtgaatccaaaggcctatccccttgccgatgcccacctcaccaagaagctactggacctcgttcagcagtcatgtaactataagcagcttcggaaaggagccaatgaggccaccaaaaccctcaacaggggcatctctgagttcatcgtgatggctgcagacgccgagccactggagatcattctgcacctgccgctgctgtgtgaagacaagaatgtgccctacgtgtttgtgcgctccaagcaggccctggggagagcctgtggggtctccaggcctgtcatcgcctgttctgtcaccatcaaagaaggctcgcagctgaaacagcagatccaatccattcagcagtccattgaaaggctcttagtctaa

SEQ ID NO: 739 - DNA, 330 bp, Homo Sapiens
atggcaaggccccagcaggtggcaatggcaacaagaagaagtcgggcaagaaggagaagaagtaacatggaggccaggccaagagccacagggcagcctctccccaaccagcccagcttctccttacctgcacccaggcctcagagtttcagggctaacccccagaatactggtaggggccaaggccatgctccccttgggaaacagaaacaagtgcccagtcagcacctaccccttcccccccagggggttgaatatgcaaaagcagttccgctgggaacccccatccaatcaactgctgtacccatgggggtagtggggttactgtag

SEQ ID NO: 740 - DNA, 1605 bp, Homo Sapiens
atgaagcaggagggctcggcgcggcgccgcggcgcggacaaggcgaaaccgccgcccggcggaggagaacaagaacccccaccgccgccggccccccaggatgtggagatgaaagaggaggcagcgacgggtggcgggtcgacgggggaggcagacggcaagacggcggcggcagcggctgagcactcccagcgagagctggacacagtcaccttggaggacatcaaggagcacgtgaaacagctagagaaagcggtttcaggcaaggagccgagattcgtgctgcgggccctgcggatgctgccttccacatcacgccgcctcaaccactatgttctgtataaggctgtgcagggcttcttcacttcaaataatgccactcgagactttttgctccccttcctggaagagcccatggacacagaggctgatttacagttccgtccccgcacgggaaaagctgcgtcgacacccctcctgcctgaagtggaagcctatctccaactcctcgtggtcatcttcatgatgaacagcaagcgctacaaagaggcacagaagatctctgatgatctgatgcagaagatcagtactcagaaccgccgggccctagaccttgtagccgcaaagtgttactattatcacgcccgggtctatgagttcctggacaagctggatgtggtgcgcagcttcttgcatgctcggctccggacagctacgcttcggcatgacgcagacgggcaggccaccctgttgaacctcctgctgcggaattacctacactacagcttgtacgaccaggctgagaagctggtgtccaagtctgtgttcccagagcaggccaacaacaatgagtgggccaggtacctctactacacagggcgaatcaaagccatccagctggagtactcagaggcccggagaacgatgaccaacgcccttcgcaaggcccctcagcacacagctgtcggcttcaaacagacggtgcacaagcttctcatcgtggtggagctgttgctgggggagatccctgaccggctgcagttccgccagccctccctcaagcgctcactcatgccctatttccttctgactcaagctgtcaggacaggaaacctagccaagttcaaccaggtcctggatcagtttggggagaagtttcaagcagatgggacctacaccctaattatccggctgcggcacaacgtgattaagacaggtgtacgcatgatcagcctctcctattcccgaatctccttggctgacatcgcccagaagctgcagttggatagccccgaagatgcagagttcattgttgccaaggccatccgggatggtgtcattgaggccagcatcaaccacgagaagggctatgtccaatccaaggagatgattgacatctattccacccgagagccccagctagccttccaccagcgcatctccttctgcctagatatccacaacatgtctgtcaaggccatgaggtttcctcccaaatcgtacaacaaggacttggagtctgcagaggaacggcgtgagcgagaacagcaggacttggagtttgccaaggagatggcagaagatgatgatgacagcttcccttga

SEQ ID NO: 741 - DNA, 2382 bp, Homo Sapiens
atggattcctggttcattcttgttctgctcggcagtggtctgatatgtgtcagtgccaacaatgctaccacagttgcaccttctgtaggaattacaagattaattaactcatcaacggcagaaccagttaaagaagaggccaaaacttcaaatccaacttcttcactaacttctctttctgtggcaccaacattcagcccaaatataactctgggacccacctatttaaccactgtcaattcttcagactctgacaatgggaccacaagaacagcaagcaccaattctataggcattacaatttcaccaaatggaacgtggcttccagataaccagttcacggatgccagaacagaaccctgggaggggaattccagcaccgcagcaaccactccagaaactttccctccttcagatgagacaccaattattgcggtgatggtggccctgtcctctctgctagtgatcgtgtttattatcatagttttgtacatgttaaggtttaagaaatacaagcaagctgggagccattccaattctttccgcttatccaacggccgcactgaggatgtggagccccagagtgtgccacttctggccagatccccaagcaccaacaggaaatacccacccctgcccgtggacaagctggaagaggaaattaaccggagaatggcagacgacaataagctcttcagggaggaattcaacgctctccctgcatgtcctatccaggccacctgtgaggctgcttccaaggaggaaaacaaggaaaaaaatcgatatgtaaacatcttgccttatgaccactctagagtccacctgacaccggttgaaggggttccagattctgattacatcaatgcttcattcatcaacggctaccaagaaaagaacaaattcattgctgcacaaggaccaaaagaagaaacggtgaatgatttctggcggatgatctgggaacaaaacacagccaccatcgtcatggttaccaacctgaaggagagaaaggagtgcaagtgcgcccagtactggccagaccaaggctgctggacctatgggaatattcgggtgtctgtagaggatgtgactgtcctggtggactacacagtacggaagttctgcatccagcaggtgggcgacatgaccaacagaaagccacagcgcctcatcactcagttccactttaccagctggccagactttggggtgccttttaccccgatcggcatgctcaagttcctcaagaaggtgaaggcctgtaaccctcagtatgcaggggccatcgtggtccactgcagtgcaggtgtagggcgtacaggtacctttgtcgtcattgatgccatgctggacatgatgcatacagaacggaaggtggacgtgtatggctttgtgagccggatccgggcacagcgctgccagatggtgcaaaccgatatgcagtatgtcttcatataccaagcccttctggagcattatctctatggagatacagaactggaagtgacctctctagaaacccacctgcagaaaatttacaacaaaatcccagggaccagcaacaatggattagaggaggagtttaagaagttaacatcaatcaaaatccagaatgacaagatgcggactggaaaccttccagccaacatgaagaagaaccgtgttttacagatcattccatatgaattcaacagagtgatcattccagttaagcggggcgaagagaatacagactatgtgaacgcatcctttattgatggctaccggcagaaggactcctatatcgccagccagggccctcttctccacacaattgaggacttctggcgaatgatctgggagtggaaatcctgctctatcgtgatgctaacagaactggaggagagaggccaggagaagtgtgcccagtactggccatctgatggactggtgtcctatggagatattacagtggaactgaagaaggaggaggaatgtgagagctacaccgtccgagacctcctggtcaccaacaccagggagaataagagccggcagatccggcagttccacttccatggctggcctgaagtgggcatccccagtgacggaaagggcatgatcagcatcatcgccgccgtgcagaagcagcagcagcagtcagggaaccaccccatcaccgtgcactgcagcgccggggcaggaaggacggggaccttctgtgccctgagcaccgtcctggagcgtgtgaaagcagaggggattttggatgtcttccagactgtcaagagcctgcggctacagaggccacacatggtccagacactggaacagtatgagttctgctacaaggtggtgcaggagtatattgatgcattctcagattatgccaacttcaagtaa

SEQ ID NO: 742 - DNA, 1176 bp, Homo Sapiens
atggcggctgtggtggagaatgtagtgaagctccttggggagcagtactacaaagatgccatggagcagtgccacaattacaatgctcgcctctgtgctgagcgcagcgtgcgcctgcctttcttggactcacagaccggagtagcccagagcaattgttacatctggatggaaaagcgacaccggggtccaggattggcctccggacagctgtactcctaccctgcccggcgctggcggaaaaagcggcgagcccatccccctgaggatccacgactttccttcccatctattaagccagacacagaccagaccctgaagaaggaggggctgatctctcaggatggcagtagtttagaggctctgttgcgcactgaccccctggagaagcgaggtgccccggatccccgagttgatgatgacagcctgggcgagtttcctgtgaccaacagtcgagcgcgaaagcggatcctagaaccagatgacttcctggatgacctcgatgatgaagactatgaagaagatactcccaagcgtcggggaaaggggaaatccaagggtaagggtgtgggcagtgcccgtaagaagctggatgcttccatcctggaggaccgggataagccctatgcctgtgacatttgtggaaaacgttacaagaaccgaccaggcctcagttaccactatgcccactcccacttggctgaggaggagggcgaggacaaggaagactctcaaccacccactcctgtttcccagaggtctgaggagcagaaatccaaaaagggtcctgatggattggccttgcccaacaactactgtgacttctgcctgggggactcaaagattaacaagaagacgggacaacccgaggagctggtgtcctgttctgactgtggccgctcagggcatccatcttgcctccaatttacccccgtgatgatggcggcagtgaagacataccgctggcagtgcatcgagtgcaaatgttgcaatatctgcggcacctccgagaatgacgaccagttgctcttctgtgatgactgcgatcgtggctaccacatgtactgtctcaccccgtccatgtctgagccccctgaaggaagttggagctgccacctgtgtctggacctgttgaaagagaaagcttccatctaccagaaccagaactcctcttga

SEQ ID NO: 743 - DNA, 1023 bp, Homo Sapiens
atggagacctcagcactcaagcagcaggagcagcccgcggcgaccaagatcaggaacctgccctgggttgaaaaataccggccacagaccctgaatgatctcatttctcatcaggacattctgagtaccattcagaagtttatcaatgaagaccgactgccacacttgcttctctacggtcccccagggacaggcaagacatctaccatcctagcctgtgcgaaacagctatataaagacaaagaatttggctccatggtcttggagctgaatgcttcagatgaccgaggaatagacatcattcgaggaccgatcctgagctttgctagcacaaggacaatatttaagaaaggctttaagctagtgatcttggatgaagcagacgccatgactcaggacgcccagaatgccttgagaagagtaattgagaaattcacagaaaataccagattctgcctcatctgtaactatctgtcaaagatcatccctgccttgcagtcccgctgcacgaggtttcggttcggtcccctgactcctgaactcatggttccccgcctggaacatgtcgtggaagaagagaaagttgatataagtgaagatggaatgaaagcactagtcactctttccagtggagacatgcgtagggctctgaacattttgcagagcaccaatatggcctttgggaaggtgacagaggagactgtctacacctgcaccgggcacccgctcaagtcagacattgccaacatcctggactggatgttgaatcaagatttcaccacagcctacagaaatattacagagttgaaaactctgaaggggttggcactgcatgatatcctgacagagatacacttgtttgtgcatagagttgactttccatcttcagttcgaatacatttattgaccaaaatggcagacattgagtacaggctttctgttggcaccaacgagaagatccagctgagctccctcattgctgcatttcaagtcaccagagacctgattgttgcagaggcctag

SEQ ID NO: 744 - DNA, 408 bp, Homo Sapiens
atggccgccctcagaccccttgtgaagcccaagatcgtcaaaaagagaaccaagaagttcatccggcaccagtcagaccgatatgtcaaaattaagcgtaactggcggaaacccagaggcattgacaacagggttcgtagaagattcaagggccagatcttgatgcccaacattggttatggaagcaacaaaaaaacaaagcacatgctgcccagtggcttccggaagttcctggtccacaacgtcaaggagctggaagtgctgctgatgtgcaacaaatcttactgtgccgagatcgctcacaatgtttcctccaagaaccgcaaagccatcgtggaaagagctgcccaactggccatcagagtcaccaaccccaatgccaggctgcgcagtgaagaaaatgagtag

SEQ ID NO: 745 - DNA, 1107 bp, Homo Sapiens
atgtcggtggcggggctgaagaagcagttctacaaggcgagccagctggtcagtgagaaggtcggaggggccgaggggaccaagctggatgatgacttcaaagagatggagaagaaggtggatgtcaccagcaaggcggtgacagaagtgctggccaggaccatcgagtacctgcagcccaacccagcctcgcgggctaagctgaccatgctcaacacggtgtccaagatccggggccaggtgaagaaccccggctacccgcagtcggaggggcttctgggcgagtgcatgatccgccacgggaaggagctgggcggcgagtccaactttggtgacgcattgctggatgccggcgagtccatgaagcgcctggcagaggtgaaggactccctggacatcgaggtcaagcagaacttcattgaccccctccagaacctgtgcgagaaagacctgaaggagatccagcaccacctgaagaaactggagggccgccgcctggactttgactacaagaagaagcggcagggcaagatccccgatgaggagctacgccaggcgctggagaagttcgaggagtccaaggaggtggcagaaaccagcatgcacaacctcctggagactgacatcgagcaggtgagtcagctctcggccctggtggatgcacagctggactaccaccggcaggccgtgcagatcctggacgagctggcggagaagctcaagcgcaggatgcgggaagcttcctcacgccctaagcgggagtataagccgaagccccgggagccctttgaccttggagagcctgagcagtccaacgggggcttcccctgcaccacagcccccaagatcgcagcttcatcgtctttccgatcttccgacaagcccatccggacccctagccggagcatgccgcccctggaccagccgagctgcaaggcgctgtacgacttcgagcccgagaacgacggggagctgggcttccatgagggcgacgtcatcacgctgaccaaccagatcgatgagaactggtacgagggcatgctggacggccagtcgggcttcttcccgctcagctacgtggaggtgcttgtgcccctgccgcagtga

SEQ ID NO: 746 - DNA, 942 bp, Homo Sapiens
atgctgctgctggcggacatggacgtggtgaatcagctggtggctgggggtcagttccgggtggtcaaggagcccctcggctttgtgaaggtgctgcaatgggtcttcgccatcttcgcctttgccacatgcggcagctacagtggggagctccagctgagcgtggattgtgccaacaagaccgagagtgacctcagcatcgaggtcgagttcgagtaccccttcaggctgcaccaagtgtactttgatgcacccacctgccgagggggcaccaccaaggtcttcttagttggggactactcctcgtcagccgaattctttgtcaccgtggccgtgtttgccttcctctactccatgggggctctggccacctacatcttcctgcagaacaagtaccgagagaataacaaagggcccatgctggactttctggccacggctgtgttcgccttcatgtggctagttagctcatcggcatgggccaaggggctgtcagatgtgaagatggccacagacccagagaacattatcaaggagatgcctgtctgccgccagacagggaacacatgcaaggagctgagagaccctgtgacctcgggactcaacacctcggtggtgttcggcttcctgaacctggtgctctgggtcggcaacctgtggttcgtgtttaaggagacaggctgggccgccccgttcctgcgcgcgcctcccggcgcccccgagaaacaaccggcacccggggacgcctacggcgatgcaggctacgggcagggccccggcgggtacgggccccaggattcctacgggcctcagggcggctaccagcctgactatggtcaaccagccggcagcggtggcagtggctacgggcctcagggcgactatgggcagcaaggctacggcccgcagggtgcacccacctccttctccaatcagatgtag

SEQ ID NO: 747 - DNA, 963 bp, Homo Sapiens
atgcctactggagactttgattcgaagcccagttgggccgaccaggtggaggaggagggggaggacgacaaatgtgtcaccagcgagctcctcaaggggatccctctggccacaggtgacaccagcccagagccagagctactgccgggagctccactgccgcctcccaaggaggtcatcaacggaaacataaagacagtgacagagtacaagatagatgaggatggcaagaagttcaagattgtccgcaccttcaggattgagacccggaaggcttcaaaggctgtcgcaaggaggaagaactggaagaagttcgggaactcagagtttgacccccccggacccaatgtggccaccaccactgtcagtgacgatgtctctatgacgttcatcaccagcaaagaggacctgaactgccaggaggaggaggaccctatgaacaaactcaagggccagaagatcgtgtcctgccgcatctgcaagggcgaccactggaccacccgctgcccctacaaggatacgctggggcccatgcagaaggagctggccgagcagctgggcctgtctactggcgagaaggagaagctgccgggagagctagagccggtgcaggccacgcagaacaagacagggaagtatgtgccgccgagcctgcgcgacggggccagccgccgcggggagtccatgcagcccaaccgcagagccgacgacaacgccaccatccgtgtcaccaacttgtcagaggacacgcgtgagaccgacctgcaggagctcttccggcctttcggctccatctcccgcatctacctggctaaggacaagaccactggccaatccaagggctttgccttcatcagcttccaccgccgcgaggatgctgcgcgtgccattgccggggtgtccggctttggctacgaccacctcatcctcaacgtcgagtgggccaagccgtccaccaactaa

SEQ ID NO: 748 - DNA, 7377 bp, Homo Sapiens
atgtcgggatccacacagcctgtggcacagacgtggagggccactgagccccgctacccgccccacagcctttcctacccagtgcagatcgcccggacgcacacggacgtcgggctcctggagtaccagcaccactcccgcgactatgcctcccacctgtcgcccggctccatcatccagccccagcggcggaggccctccctgctgtctgagttccagcccgggaatgaacggtcccaggagctccacctgcggccagagtcccactcatacctgcccgagctggggaagtcagagatggagttcattgaaagcaagcgccctcggctagagctgctgcctgaccccctgctgcgaccgtcacccctgctggccacgggccagcctgcgggatctgaagacctcaccaaggaccgtagcctgacgggcaagctggaaccggtgtctccccccagccccccgcacactgaccctgagctggagctggtgccgccacggctgtccaaggaggagctgatccagaacatggaccgcgtggaccgagagatcaccatggtagagcagcagatctctaagctgaagaagaagcagcaacagctggaggaggaggctgccaagccgcccgagcctgagaagcccgtgtcaccgccgcccatcgagtcgaagcaccgcagcctggtgcagatcatctacgacgagaaccggaagaaggctgaagctgcacatcggattctggaaggcctggggccccaggtggagctgccgctgtacaaccagccctccgacacccggcagtatcatgagaacatcaaaataaaccaggcgatgcggaagaagctaatcttgtacttcaagaggaggaatcacgctcggaaacaatgggagcagaagttctgccagcgctatgaccagctcatggaggcctgggagaagaaggtggagcgcatcgagaacaacccccggcggcgggccaaggagagcaaggtgcgcgagtactacgagaagcagttccctgagatccgcaagcagcgcgagctgcaggagcgcatgcagagggtgggccagcggggcagtgggctgtccatgtcggccgcccgcagcgagcacgaggtgtcagagatcatcgatggcctctcagagcaggagaacctggagaagcagatgcgccagctggccgtgatcccgcccatgctgtacgacgctgaccagcagcgcatcaagttcatcaacatgaacgggcttatggccgaccccatgaaggtgtacaaagaccgccaggtcatgaacatgtggagtgagcaggagaaggagaccttccgggagaagttcatgcagcatcccaagaactttggcctgatcgcatcattcctggagaggaagacagtggctgagtgcgtcctctattactacctgactaagaagaatgagaactataagagcctggtgagacggagctatcggcgccgcggcaagagccagcagcagcaacaacagcagcagcagcagcagcagcagcagcagcagcagcccatgccccgcagcagccaggaggagaaagatgagaaggagaaggaaaaggaggcggagaaggaggaggagaagccggaggtggagaacgacaaggaagacctcctcaaggagaagacagacgacacctcaggggaggacaacgacgagaaggaggctgtggcctccaaaggccgcaaaactgccaacagccagggaagacgcaaaggccgcatcacccgctcaatggctaatgaggccaacagcgaggaggccatcaccccccagcagagcgccgagctggcctccatggagctgaatgagagttctcgctggacagaagaagaaatggaaacagccaagaaaggtctcctggaacacggccgcaactggtcggccatcgcccggatggtgggctccaagactgtgtcgcagtgtaagaacttctacttcaactacaagaagaggcagaacctcgatgagatcttgcagcagcacaagctgaagatggagaaggagaggaacgcgcggaggaagaagaagaaagcgccggcggcggccagcgaggaggctgcattcccgcccgtggtggaggatgaggagatggaggcgtcgggcgtgagcggaaatgaggaggagatggtggaggaggctgaagccactgtcaacaacagctcagacaccgagagcatcccctctcctcacactgaggccgccaaggacacagggcagaatgggcccaagcccccagccaccctgggcgccgacgggccacccccagggccacccaccccaccaccggaggacatcccggcccccactgagcccaccccggcctctgaagccaccggagcccctacgcccccaccagcacccccatcgccctctgcacctcctcctgtggtccccaaggaggagaaggaggaggagaccgcagcagcgcccccagtggaggagggggaggagcagaagccccccgcggctgaggagctggcagtggacacagggaaggccgaggagcccgtcaagagcgagtgcacggaggaagccgaggaggggccggccaagggcaaggacgcggaggccgctgaggccacggccgagggggcgctcaaggcagagaagaaggagggcgggagcggcagggccaccacagccaagagctcgggcgccccccaggacagcgactccagtgctacctgcagtgcagacgaggtggatgaggccgagggcggcgacaagaaccggctgctgtccccaaggcccagcctcctcaccccgactggcgacccccgggccaatgcctcaccccagaagccactggacctgaagcagctgaagcagcgagcggctgccatcccccccatccaggtcaccaaagtccatgagcccccccgggaggacgcagctcccaccaagccagctcccccagccccaccgccaccgcaaaacctgcagccggagagcgacgcccctcagcagcctggcagcagcccccggggcaagagcaggagcccggcaccccccgccgacaaggaggcagagaagcctgtgttcttcccagccttcgcagccgaggcccagaagctgcctggggaccccccttgctggacttccggcctgcccttccccgtgcccccccgtgaggtgatcaaggcctccccgcatgccccggacccctcagccttctcctacgctccacctggtcacccactgcccctgggcctccatgacactgcccggcccgtcctgccgcgcccacccaccatctccaacccgcctcccctcatctcctctgccaagcaccccagcgtcctcgagaggcaaataggtgccatctcccaaggaatgtcggtccagctccacgtcccgtactcagagcatgccaaggccccggtgggccctgtcaccatggggctgcccctgcccatggaccccaaaaagctggcacccttcagcggagtgaagcaggagcagctgtccccacggggccaggctgggccaccggagagcctgggggtgcccacagcccaggaggcgtccgtgctgagagggacagctctgggctcagttccgggcggaagcatcaccaaaggcattcccagcacacgggtgccctcggacagcgccatcacataccgcggctccatcacccacggcacgccagctgacgtcctgtacaagggcaccatcaccaggatcatcggcgaggacagcccgagtcgcttggaccgcggccgggaggacagcctgcccaagggccacgtcatctacgaaggcaagaagggccacgtcttgtcctatgagggtggcatgtctgtgacccagtgctccaaggaggacggcagaagcagctcaggacccccccatgagacggccgcccccaagcgcacctatgacatgatggagggccgcgtgggcagagccatctcctcagccagcatcgaaggtctcatgggccgtgccatcccgccggagcgacacagcccccaccacctcaaagagcagcaccacatccgcgggtccatcacacaagggatccctcggtcctacgtggaggcacaggaggactacctgcgtcgggaggccaagctcctaaagcgggagggcacgcctccgcccccaccgccctcacgggacctgaccgaggcctacaagacgcaggccctgggccccctgaagctgaagccggcccatgagggcctggtggccacggtgaaggaggcgggccgctccatccatgagatcccgcgcgaggagctgcggcacacgcccgagctgcccctggccccgcggccgctcaaggagggctccatcacgcagggcaccccgctcaagtacgacaccggcgcgtccaccactggctccaaaaagcacgacgtacgctccctcatcggcagccccggccggacgttcccacccgtgcacccgctggatgtgatggccgacgcccgggcactggaacgtgcctgctacgaggagagcctgaagagccggccagggaccgccagcagctcggggggctccattgcgcgcggcgccccggtcattgtgcctgagctgggtaagccgcggcagagccccctgacctatgaggaccacggggcaccctttgccggccacctcccacgaggttcgcccgtgaccacgcgggagcccacgccgcgcctgcaggagggcagcctttcgtccagcaaggcatcccaggaccgaaagctgacgtcgacgcctcgtgagatcgccaagtccccgcacagcaccgtgcccgagcaccacccacaccccatctcgccctatgagcacctgcttcggggcgtgagtggcgtggacctgtatcgcagccacatccccctggccttcgaccccacctccataccccgcggcatccctctggacgcagccgctgcctactacctgccccgacacctggcccccaaccccacctacccgcacctgtacccaccctacctcatccgcggctaccccgacacggcggcgctggagaaccggcagaccatcatcaatgactacatcacctcgcagcagatgcaccacaacgcggccaccgccatggcccagcgagctgatatgctgaggggcctctcgccccgcgagtcctcgctggcactcaactacgctgcgggtccccgaggcatcatcgacctgtcccaagtgccacacctgcctgtgctcgtgcccccgacaccaggcaccccagccaccgccatggaccgccttgcctacctccccaccgcgccccagcccttcagcagccgccacagcagctccccactctccccaggaggtccaacacacttgacaaaaccaaccaccacgtcctcgtccgagcgggagcgagaccgggatcgagagcgggaccgggatcgggagcgggaaaagtccatcctcacgtccaccacgacggtggagcacgcacccatctggagacctggtacagagcagagcagcggcagcagcggcgggggtgggggcagcagcagccgccccgcctcccactcccatgcccaccagcactcgcccatctcccctcggacccaggatgccctccagcagagacccagtgtgcttcacaacacaggcatgaagggtatcatcaccgctgtggagcccagcacgcccacggtcctgaggtccacctccacctcctcacccgttcgcccggctgccacattcccacctgccacccactgcccactgggcggcaccctcgatggggtctaccctaccctcatggagcccgtcttgctgcccaaggaggccccccgggtcgcccggccagagcggccccgagcagacaccggccatgccttcctcgccaagcccccagcccgctccgggctggagcccgcctcctcccccagcaagggctcggagccccggcccctagtgcctcctgtctctggccacgccaccatcgcccgcacccctgcgaagaacctcgcacctcaccacgccagcccggacccgccggcgccacctgcctcggcctcggacccgcaccgggaaaagactcaaagtaaacccttttccatccaggaactggaactccgttctctgggttaccacggcagcagctacagccccgaaggggtggagcccgtcagccctgtgagctcacccagtctgacccacgacaaggggctccccaagcacctggaagagctcgacaagagccacctggagggggagctgcggcccaagcagccaggccccgtgaagcttggcggggaggccgcccacctcccacacctgcggccgctgcctgagagccagccctcgtccagcccgctgctccagaccgccccaggggtcaaaggtcaccagcgggtggtcaccctggcccagcacatcagtgaggtcatcacacaggactacacccggcaccacccacagcagctcagcgcacccctgcccgcccccctctactccttccctggggccagctgccccgtcctggacctccgccgcccacccagtgacctctacctcccgcccccggaccatggtgccccggcccgtggctccccccacagcgaagggggcaagaggtctccagagccaaacaagacgtcggtcttgggtggtggtgaggacggtattgaacctgtgtccccaccggagggcatgacggagccagggcactcccggagtgctgtgtacccgctgctgtaccgggatggggaacagacggagcccagcaggatgggctccaagtctccaggcaacaccagccagccgccagccttcttcagcaagctgaccgagagcaactccgccatggtcaagtccaagaagcaagagatcaacaagaagctgaacacccacaaccggaatgagcctgaatacaatatcagccagcctgggacggagatcttcaatatgcccgccatcaccggaacaggccttatgacctatagaagccaggcggtgcaggaacatgccagcaccaacatggggctggaggccataattagaaaggcactcatgggtggcggcgggaaggccaaggtctctggcagacccagcagccgaaaagccaagtccccggccccgggcctggcatctggggaccggccaccctctgtctcctcagtgcactcggagggagactgcaaccgccggacgccgctcaccaaccgcgtgtgggaggacaggccctcgtccgcaggttccacgccattcccctacaaccccctgatcatgcggctgcaggcgggtgtcatggcttccccacccccaccgggcctccccgcgggcagcgggcccctcgctggcccccaccacgcctgggacgaggagcccaagccactgctctgctcgcagtacgagacactctccgacagcgagtga

SEQ ID NO: 749 - DNA, 1341 bp, Homo Sapiens
atggaggagaccatcaaagatccccccacatcagctgtcttgctggatcactgtcatttctctcaggtcatctttaacagtgtggagaagttctacatccctggaggggacgtcacatgtcattataccttcacccagcatttcatccctcgtcgaaaggattggattggcatctttagagtggggtggaagacaacccgtgagtattacaccttcatgtgggttactttgcccattgacctaaacaacaaatcagctaaacagcaggaagtccaattcaaagcttactacctgcccaaggatgatgagtattaccagttctgctatgtggatgaggatggtgtggtccggggagcaagtattcctttccaattccgtccagaaaatgaggaagacatcctggttgttaccactcagggagaggtggaagagattgagcagcacaacaaggagctttgcaaagaaaaccaggagctgaaggacagctgtatcagcctccagaagcagaactcagacatgcaggctgagctccaaaagaagcaggaggagctagaaaccctacagagcatcaataagaagttggaactgaaagtgaaagaacagaaggactattgggagacagagctgcttcaactgaaagaacaaaaccagaagatgtcctcagaaaatgagaagatgggaatcagagtggatcagcttcaggcccagctgtcaactcaagagaaagaaatggagaagcttgttcagggagatcaagataagacagagcagttagagcagctgaaaaaggaaaatgaccacctctttctcagtttaactgaacagaggaaggaccagaagaagctcgagcagacagtggagcaaatgaagcagaatgaaactactgcaatgaagaaacaacaggaattaatggatgaaaactttgacctgtcaaaaagactgagtgagaacgaaattatatgtaatgctctgcagagacagaaagagagattggaaggagaaaatgatcttttgaagagggagaacagcagattgctcagttacatgggtctggattttaattctttgccgtatcaagtacctacttcagatgaaggaggcgcaagacaaaatccaggacttgcctatggaaacccatattctggtatccaagaaagttcttcccccagcccgctctccatcaagaaatgccctatctgcaaagcagatgatatttgtgatcacaccttggagcaacagcagatgcagcccctttgtttcaattgtccaatttgtgacaagatcttcccagctacagagaagcagatctttgaagaccacgtgttctgccactctctctga

SEQ ID NO: 750 - DNA, 1050 bp, Homo Sapiens
atggcgcaccaaacgggcatccacgccacggaagagctgaaggaattctttgccaaggcacgggctggctctgtgcggctcatcaaggttgtgattgaggacgagcagctcgtgctgggtgcctcgcaggagccagtaggccgctgggatcaggactatgacagggccgtgctgccactgctggacgcccagcagccctgctacctgctctaccgcctcgactcacagaatgctcagggcttcgaatggctcttcctcgcctggtcgcctgataactcccccgtgcggctgaagatgctgtacgcggccacgcgggccacagtgaaaaaggagtttggaggtggccacatcaaggatgagctcttcgggactgtgaaggatgacctctcttttgctgggtaccagaaacacctgtcgtcctgtgcggcacctgccccgctgacctcggctgagagagagctccagcagatccgcattaacgaggtgaagacagagatcagtgtggaaagcaagcaccagaccctgcagggcctcgccttccccctgcagcctgaggcccagcgggcactccagcagctcaagcagaaaatggtcaactacatccagatgaagctggacctagagcgggaaaccattgagctggtgcacacagagcccacggatgtggcccagctgccctcccgggtgccccgagatgctgcccgctaccacttcttcctctacaagcacacccatgagggcgacccccttgagtctgtagtgttcatctactccatgccggggtacaagtgcagcatcaaggagcgaatgctctactccagctgcaagagccgcctcctcgactccgtggagcaggacttccatctggagatcgccaagaaaattgagattggcgatggggcagagctgacggcagagttcctctacgacgaggtgcaccccaagcaacacgccttcaagcaggccttcgccaagcccaagggcccagggggcaagcggggccataagcgcctcatccgcggcccgggtgaaaatggggatgacagctag

SEQ ID NO: 751 - DNA, 1396 bp, Homo Sapiens
agcgggggcggaactcctagcggacacctcgtggagtccggccggaagagcaaccgagatgaaggtgaagatgctgagccggaatccggacaattatgtccgcgaaaccaagttggacttacagagagttccaagaaactatgatcctgctttacatccttttgaggtcccacgagaatatataagagctttaaatgctaccaaactggaacgagtatttgcaaaaccattccttgcttcgctggatggtcaccgtgatggagtcaattgcttggcaaagcatccagagaagctggctactgtcctttctgggtcgtgtgatggagaggttagaatttggaatctaactcagcggaattgtatccgtacaatacaagcacatgaaggctttgtacgaggaatatgtactcgcttttgtgggacttcttttttcactgttggtgatgacaaaactgtgaagcagtggaaaatggatgggccaggctatggagacgaggaagagccattacatacaatattaggaaagacagtgtatactgggattgatcatcactggaaagaagctgtttttgccacatgtggacagcaagtagacatttgggatgaacaaagaactaatcctatatgttcaatgacctggggatttgacagtataagtagtgttaaatttaacccaattgagacatttctcttgggaagttgtgcatctgacaggaatatagtactgtacgatatgaggcaagctactcctttgaaaaaggttatcttagatatgagaacaaatacaatctgttggaaccctatggaagctttcatttttacagcagcaaatgaagattataacttatatacttttgatatgcgtgcactggacactcctgtaatggtccatatggatcatgtatctgcagtgcttgatgtggattactctcccactgggaaggagtttgtgtctgctagtttcgataaatctattcgaatctttcctgtagacaaaagtcgaagcagggaggtatatcatacaaagagaatgcaacatgttatctgtgtaaaatggacttctgacagcaagtatattatgtgtggatctgatgaaatgaacattcgcctgtggaaagctaatgcttctgaaaaattgggtgtgcttacatcacgagaaaaagcagccaaggattataaccagaaattgaaggagaaatttcagcattatcctcatataaaacgtatagctcgtcatcgacatctaccaaaatctatctatagccagattcaggaacagcgcatcatgaaagaagctcgtcgacgaaaggaagtgaatcgtattaaacacagcaagcctggatctgtgccacttgtgtcagagaagaagaaacacgtagtggcagttgtaaaataa

SEQ ID NO: 752 - DNA, 4014 bp, Homo Sapiens
atgatgcagggaaacacatgtcacagaatgtcgttccacccgggacgagggtgtccccgaggacgaggaggacatggagccagaccctcagcaccatcctttaggccccaaaatctgaggctgcttcaccctcagcagcctcctgtgcaatatcaatatgaacctccaagtgccccttccaccactttctcaaactctccagcccccaattttctccctccacgaccagactttgtacccttccccccacccatgcctccgtcagcgcaaggccctcttcccccctgcccaatcaggccgcctttccccaaccaccagatgaggcaccccttcccagttcctccttgttttcctcccatgccaccaccaatgccttgtcctaataaccccccagtccctggggcacctcctggacaaggcactttccccttcatgatgccccctccctccatgcctcatcccccgccccctccagtcatgccgcagcaggttaattatcagtaccctccgggctattctcaccacaacttcccacctcccagttttaatagtttccagaacaaccctagttctttcctgcccagtgctaataacagcagtagtcctcatttcagacatctccctccatacccactcccaaaggctcccagtgagagaaggtccccagaaaggctgaaacactatgatgaccacaggcaccgagatcacagtcatgggcgaggtgagaggcatcggtccctggatcggcgggagcgaggccgcagtcccgacaggagaagacaagacagccggtacagatctgattatgaccgagggagaacaccatctcgccaccgcagctacgaacggagcagagagcgagaacgggagagacacaggcatcgagacaaccgaagatcaccatctctggaaaggtcctacaaaaaagagtataagagatctggaagtcgctccccaagtagggagaagaagagagctcgttgggaggaagaaaaagaccgttggagtgacaaccagagttctggcaaagacaagaactatacctcaatcaaggaaaaagagcccgaggagaccatgcctgacaagaatgaggaggaagaagaagaacttcttaagcctgtgtggattcgatgcactcattcagaaaactactactccagtgaccccatggatcaggtgggagattctacagtggttggaacgagtaggcttcgtgacttatatgacaaatttgaggaggagttggggagcaggcaagaaaaggccaaagctgctcggcctccgtgggaacctccaaagacgaagctcgatgaagatttagagagttccagtgaatccgagtgtgagtctgatgaggacagcacctgttctagcagctcagactctgaagtttttgacgttattgcagaaatcaaacgcaaaaaggcccaccctgaccgacttcatgatgaactttggtacaacgatccaggccagatgaatgatggaccactctgcaaatgcagcgcaaaggcaagacgcacaggaattaggcacagcatttatcctggagaagaggccatcaagccctgtcgtcctatgaccaacaatgctggcagacttttccactaccggatcacagtctccccgcctacgaactttttaactgacaggccaactgttatagaatacgatgatcacgagtatatctttgaaggattttctatgtttgcacatgcccccctgaccaatattccactgtgtaaagtaattagattcaacatagactacacgattcatttcattgaagagatgatgccggagaatttttgtgtgaaagggcttgaactcttttcactgttcctattcagagatattttggaattatatgactggaatcttaaaggtcctttgtttgaagacagccctccctgctgcccaagatttcatttcatgccacgttttgtaagatttcttccagatggaggaaaggaagtgctgtccatgcaccagattctcctgtacttgttaaggtgcagcaaagccctggtgcctgaggaggagattgccaatatgcttcagtgggaggagctggagtggcagaaatatgcagaagaatgcaaaggcatgattgttaccaaccctgggacgaaaccaagctctgtccgtatcgatcaactggatcgtgaacagttcaaccccgatgtgattacttttccgattatcgtccactttgggatacgccctgcacagttgagttatgcaggagacccacagtaccaaaaactgtggaagagttatgtgaaacttcgccacctcctagcaaatagtcccaaagtcaaacaaactgacaaacagaagctggcacagagggaggaagccctccaaaaaatacggcagaagaatacaatgagacgagaagtaacggtggagctaagtagccaaggattctggaaaactggcatccgttctgatgtctgtcagcatgcaatgatgctacctgttctgacccatcatatccgctaccaccaatgcctaatgcatttggacaagttgataggatatactttccaagatcgttgtctgttgcagctggccatgactcatccaagtcatcatttaaattttggaatgaatcctgatcatgccaggaattcattatctaactgtggaattcggcagcccaaatacggagacagaaaagttcatcacatgcacatgcggaagaaagggattaacaccttgataaatatcatgtcacgccttggccaagatgacccaactccctcgaggattaaccacaatgaacggttggaattcctgggtgatgctgttgttgaatttctgaccagcgtccatttgtactatttgtttcctagtctggaagaaggaggattagcaacctatcggactgccattgttcagaatcagcaccttgccatgctagcaaagaaacttgaactggatcgatttatgctgtatgctcacgggcctgacctttgtagagaatcggaccttcgacatgcaatggccaattgttttgaagcgttaataggagctgtttacttggagggaagcctggaggaagccaagcagttatttggacgcttgctctttaatgatccggacctgcgcgaagtctggctcaattatcctctccacccactccaactacaagagccaaatactgatcgacaacttattgaaacttctccagttctacaaaaacttactgagtttgaagaagcaattggagtaatttttactcatgttcgacttctggcaagggcattcacattgagaactgtgggatttaaccatctgaccctaggccacaatcagagaatggaattcctaggtgactccataatgcaactggtagccacagagtacttattcattcatttcccagatcatcatgaaggacacttaactttgttgcgaagctctttggtgaataatagaactcaggccaaggtagcggaggagctgggcatgcaggagtacgccataaccaacgacaagaccaagaggcctgtggcgcttcgcaccaagaccttggcggaccttttggaatcatttattgcagcgctgtacattgataaggatttggaatatgttcatactttcatgaatgtctgcttctttccacgattgaaagagttcattttgaatcaggattggaatgaccccaaatcccagcttcagcagtgttgcttgacacttaggacagaaggaaaagagccagacattcctctgtacaagactctgcagacagtgggcccatcccatgcccgaacctacactgtggctgtttatttcaagggagaaagaataggctgtgggaaaggaccaagtattcagcaagcggaaatgggagcagcaatggatgcgcttgaaaaatataattttccccagatggcccatcagaagcggttcatcgaacggaagtacagacaagagttaaaagaaatgaggtgggaaagagagcatcaagagagagagccagatgagactgaagacatcaagaaataa

SEQ ID NO: 753 - DNA, 1029 bp, Homo Sapiens
atgtcccgccaggcgaaggatgacttcctgcggcactacacagtgtcggaccccaggactcaccccaagggctacaccgagtacaaagtaaccgcgcagttcatctcaaagaaggacccagaggatgtcaaagaggtggtggtctggaagcggtacagcgacttccgcaagctgcatggagacctggcctacacccaccgcaacctcttccgccgcctcgaggagttccctgctttcccccgggcccaggtgtttggccggtttgaagcctcagtgatcgaggagcggcgaaagggggcagaggacctgcttcgcttcactgtgcacatacctgcgctcaacaacagcccccagctcaaggagttcttccggggtggggaggtgacccgacccttggaggtgtccagggacctacacatcctgccaccccctctgatccccaccccgccccctgatgacccccggctatcccaactgctccctgcagaaaggaggggcctcgaggaattggaggtgccagtggaccccccaccatccagccctgcccaggaggccctggatctcctctttaactgtgagagcaccgaggaggcatctggttcccctgcccgaggccccctcaccgaggctgagcttgccctcttcgaccccttctccaaggaagaaggcgcagcccccagccccacccatgtggctgagctggcaacgatggaggtggagtctgcaaggctggaccaggaaccctgggagccaggagggcaggaggaggaagaggatggggaaggagggcccacccctgcctacctaagccaggccacagagctcatcacccaggccctgcgggatgagaaggcaggcgcttacgctgctgcactccagggctatcgagacggcgtgcacgtcttgcttcagggagtccccagtgacccgttgcctgcccgccaggaaggtgtgaagaagaaggcagctgagtacctgaagcgggcagaggagatcctgcgcctgcacctgtctcaactcccaccctaa

SEQ ID NO: 754 - DNA, 2106 bp, Homo Sapiens
atggttgtcagcacatttaccgatatggacacttttcccaataattttcctcctggtggagacagtggattgacaggttctcagtcggagttccagaaaatgttaattgatgaaaggttacgatgtgagcatcataaagctaattatcagacactgaaggctgaacacacaaggttgcagaatgaacatgtaaagttacaaaatgaactcaagcacctgtttaatgaaaagcaaactcagcaggaaaaacttcagctcctgcttgaagaactaagaggagaattagtagagaaaactaaagatttagaagaaatgaaactgcagatattaactccacaaaaattggaattgctaagagcccaaatacaacaagaattagaaactccaatgagagaacgttttaggaatctagatgaagaggtagaaaagtatagagctgtatataataagcttcgctatgaacatacatttctcaagtcagaatttgaacaccagaaggaagagtatgcacgtattttagatgaaggaaaaataaaatatgaatcagagattgcaagactggaggaagataaagaagaactacgtaaccagctgcttaatgttgatctcacaaaagacagcaaacgagtggaacaacttgctcgagaaaaagtctatttgtgtcaaaaattaaaaggtttagaggctgaagtagcggaattaaaggctgaaaaggagaattctgaggctcaggtggaaaatgcccaaagaatacaggtgcggcagttggctgagatgcaggctacagtcagatccctggaggctgaaaaacaatcagctaatttacgggcagaacgtttggaaaaagagctacaatcaagcagtgaacaaaatacctttttaattaataaattgcataaagctgaacgagaaataaatacattgtccagtaaagtaaaagaacttaaacattcaaacaaactggaaataacagacatcaaactggagacagcaagagctaagagtgagctagaaagagaaaggaataagattcaaagtgaactggatggattacagtcagacaatgaaattctcaaagcagctgttgaacatcacaaagtgctcttagtagaaaaggatcgtgaattaatacgtaaagtacaagctgccaaagaagaaggttatcaaaaacttgtggtattacaagatgaaaagttagaactcgagaacagattagcagatttggagaaaatgaaagtggaacatgatgtctggaggcaatctgaaaaggatcagtatgaagagaaattgcgggcttcacagatggcagaagagatcaccaggaaggagcttcagagtgttaggttaaaacttcagcaacaaattgtgactattgaaaatgcagagaaggaaaaaaatgaaaattctgacctaaaacagcaaatcagtagtttgcagatccaagtgacttcacttgcacagtcagagaatgacttgctgaattcaaaccaaatgctgaaggaaatggtggagagattaaaacaagaatgccgaaattttagaagccaagctgaaaaagcgcaactagaagctgaaaagacattggaagagaaacagatacagtggttggaagaaaagcataagcttcatgagcgtatcacagacagagaagaaaagtacaatcaagctaaggagaaactgcagcgagctgcaattgcccagaaaaagagaaaatctcttcatgaaaacaaattgaaaagactacaagagaaagtagaagtcttggaggcaaagaaagaagaattggaaacagaaaatcaggtcttaaatagacaaaatgttccttttgaagactatacaaggcttcaaaaaagactaaaagatatacagagaagacataatgaatttcgaagtctaattttggttcctaacatgcctccaacagcatctatcaatcctgttagctttcagtcatcagccatggttccaagcatggaactaccatttcctcctcatatgcaggaggaacaacatcaaagggaactctctctacttcgcaaaagactagaagaactggaaacaacacaaagaaaacaactagaggaacttggatcttccggagaatga

SEQ ID NO: 755 - DNA, 1026 bp, Homo Sapiens
atggagagggcaggaccagccggggaggagggcggcgcgcgcgagggtcgccttcttcccagggcaccgggggcgtgggtgctgcgggcgtgcgccgagagggcagccttggaagtgggcgcagcttcggcagacacaggcgtgaggggctgcggagctcgagggccggcgcccctgcttgcctctgcgggaggtgggcgcgcccgggacggaacctggggcgtcagaacgaaaggcagcggcgccgcgcttcccagccggccagcctcccgcgcagcgccccggccggaagcctcctcgccgccgcttcctctcgagaaggcgcggggcgggctgtccggcccgcagggcggtcgagcccgcggcgccatggctcacgtcggctcccgcaagcgctcgaggagtcgcagccggtcccggggacgggggtcggaaaagagaaagaagaagagcaggaaagacacctcgaggaactgctcggcctccacatcccaagagagaagcaagcagaaggcccggaggagaacaagatccagctcctcctcctcttcttccagttcttctagctcctcttcttcctcctcgtcctcctcctcttcctccagtgatggccggaagaagcgggggaagtacaaggacaagaggaggaagaagaagaagaagaggaagaagctgaagaagaagggcaaggagaaggcggaagcacagcaggtggaggctctgccgggcccctcgctggaccagtggcaccgatcagctggggaggaagaggatggcccagtcctgacggatgagcagaagtcccgaatccaggccatgaagcccatgaccaaggaggagtgggatgcccggcagagcatcatccgcaaggtggtggaccctgagacggggcgcaccaggcttattaagggagatggcgaggtcctagaggaaatcgtaaccaaagaacgacacagagagatcaacaagcaagccacccgaggggactgcctggccttccagatgcgagctgggttgcttccctga

SEQ ID NO: 756 - DNA, 744 bp, Homo Sapiens
atgtcgggcaaagaccgaattgaaatctttccctcgcgaatggcacagaccatcatgaaggctcgtttaaagggagcacagacaggtcgaaacctcctgaagaaaaaatctgatgccttaactcttcgatttcgacagatcctaaagaagataatagagactaaaatgttgatgggcgaagtgatgagagaagctgccttttcactagctgaagccaagttcacagcaggtgacttcagcactacagttatccaaaatgtcaataaagcgcaagtgaagattcgagcgaagaaagataatgtagcaggtgttactttgccagtatttgaacattaccatgaaggaactgacagttatgaactgactggtttagccagaggtggggaacagttggctaaattaaagaggaattatgccaaagcagtggaactactggtggaactagcttctctgcagacttcttttgttactttggatgaagctattaagataaccaacaggcgtgtaaatgccattgaacatgtcatcattccccggattgaacgtactcttgcttatatcatcacagagctggatgagagagagcgagaagagttctataggttaaagaaaatacaagagaagaaaaagattctaaaggaaaaatctgagaaggacttggagcaaaggagagcagctggagaggtgttggagcctgctaatcttctggctgaagagaaggacgaggatcttctatttgaataa

SEQ ID NO: 757 - DNA, 600 bp, Homo Sapiens
atggctgcagccaacaagggtaagtgccttcctggcgtggtaggacttgcacaagctcttccggtgggccctggtaggagggccattgctgcaggcaacaagcccagagtccggagtatccgctttgcggcaggccacgatgcagaaggatcccacagccacgtccactttgatgagaagctgcatgactcggtggtcatggtcacccaggagagtgacagcagctttctggtcaaggttggcttcctgaagatcctgcacaggtatgagattaccttcactctgcccccagtgcacaggctgagcaaggatgtccgcgaggcacctgtccccagcctgcacctcaagctcctcagcgtggtgcccgtccctgaaggttatagtgtcaagtgtgagtactcggcgcacaaagagggcgtcctcaaagaggagatactgctagcctgcgaaggtggcactggcacctgtgtgcgcgtgacggtgcaggcccgcgtcatggaccggcaccacggcacgcccatgctgctggatggtgtcaagtgtgtgggcgccgagctggaatacgactcagagcacagcgactggcacggctttgactga

SEQ ID NO: 758 - DNA, 573 bp, Homo Sapiens
atggggcggggatttcggggcaccgggtcctcaccttcacgagaaaggccccacagcacgtccccactacccgacgactcactcttcgtggcttctctctcctccccaagagcaggggtgggcctgtctcgcgttcccctgcgggagtcaggaagcgtccttcctacctaccagtcctcccctctggtgtctggggacacttcctgggggcctttcaggtggttggcgccggtgcagggcctgagagcctgggggcgcggcctcagggtccccacatgccgcagaggccaccgccagtacctgcgcagcggccctgactacgacttcgcgcgctaccggagcacagtgcacggggtgacccaggccttcgccgccgcctcgcgggaggtgctggcggtggaagcagagctgggcgggcctcgcaggcagccgctgctcgccggccacgtgcgcagcctgcaggagctggagcagacgcggctgggcacggtggccctgctgcagttgatggagacgccagagctggcggggcaggaggacgctgtacggatgcagcagctgaaaatgaagtga

SEQ ID NO: 759 - DNA, 585 bp, Homo Sapiens
atggccaagcggcgtgcggccgagccggtgacgttccacgtgccttggaagcggctcctgctttgcgacttcgctgagcagccgccgccaccgcctctctggatccggccgcccggggtcgcgcatgctgggcagctcctcggcgtcccagagcagcaccgaaagcgcaaaatcgacgcagggaccatggcagagccctcggcttcgcccagcaagcgccgtgacagcggggacaacagcgccccgagcggccaggagcgtgaggaccacggtctggagacaggcgatccgccgctgccgccgccgcccgtactgccggggccgggggaggagctcccgggcgcccggctcccggggggcggtggcgacgacggggcggggcgcgcaggacccccgcggggagactggggggtcgcatcgcgccagcacaatgaagaattttggcagtataataccttccagtactggaggaatcctttgcctcctattgatctggcagacattgaagatttaagtgaagacaccctgacagaagcaacacttcagggcaggaatgaaggggctgaggttgacatggagtcctga

SEQ ID NO: 760 - DNA, 363 bp, Homo Sapiens
atggagtccaaagaggaactagcggcaaacaatctcaacggggaaaatgcccaacaagaaaacgaaggaggggagcaggcccccacgcagaatgaagaagaatcccgccatttgggagggggtgaaggccagaagcctggaggaaatatcaggcgggggcgagttaggcgacttgtccctaattttcgatgggccatacctaataggcatattgagcacaatgaagcgagagatgatgtagaaaggtttgtagggcagatgatggaaatcaagagaaagactagggaacagcagatgaggcactatatgcgcttccaaactcctgaacctgacaaccattatgacttttgcctcataccttga

SEQ ID NO: 761 - DNA, 2310 bp, Homo Sapiens
atgggatgtaatatgtgcgtggtccagaaaccggaggagcagtacaaagtgatgctgcaggtgaacgggaaggagctctccaagctgtctcaggagcaaactctgcaggccctgcgctcctccaaggagcccctggtgatccaggtgctgagacgcagcccccgcctccggggggacagctcctgtcacgacctgcagctggtggacagtggcactcagaccgacatcaccttcgagcatatcatggcgctgggcaagctgcgtccgcccaccccgcccatggtcatcctggagccccccccaatcagccatgagtattatgacccggcggagtttatggagggcggcccgcaggaggcagaccgcttggatgagctggagtatgaggaggtggagctgtataaaagcagccaccgggacaagctgggcctgatggtttgctaccgcacggacgacgaggaggacctgggcatttatgtcggagaggtaaatcccaacagcattgcagccaaagacggccggatccgtgagggagaccgcatcatccagattaacggtgtagacgtccagaaccgggaagaggcggtggccatcctgagccaggaagagaacaccaacatctccctgctggtggcccgacctgagagtcagctggcgaaaaggtggaaggacagcgaccgggatgacttcctggatgactttggctctgagaatgagggggagctgcgtgctcgtaaactgaaatcaccccctgcccagcagcccggaaacgaagaggagaagggggctcccgatgccggcccaggcctgagcaacagccaggagctggacagcggggtgggccggactgacgagagcacccggaacgaagagagctctgagcacgacctgctgggggacgaacccccgagctccaccaacaccccgggaagcctgcgcaagtttggcctgcaaggggacgccctgcagagccgggacttccatttcagcatggactctctgctggccgagggggcggggctgggagggggcgacgtcccgggcctcacggatgaggagtatgagcgctaccgtgagctcctggagatcaagtgccacctggagaacggcaaccagctgggcctcctctttccccgggcctccggaggcaacagcgccctggacgtcaaccgcaacgagagcctgggccacgagatggccatgctggaggaggagctaaggcacctggaattcaagtgccgcaacatactgcgggcgcagaagatgcagcagctgcgtgagcgctgcatgaaggcctggctgctggaggaggagagcctctacgacctggcggccagcgagcccaagaagcacgagctgtccgacatctccgagctgcccgagaagtcggacaaggacagcaccagcgcctacaacactggggagagctgccgcagcaccccgctgcttgtggagcccctgcccgagagccccctgcggcgggccatggccggcaactccaacttgaaccggacccctcccggccccgctgttgccacccccgccaaggcagctcctccaccggggagccccgccaagttccggtccctctcccgggatcctgaggccggccggaggcagcacgcggaggagcgcggccgccgcaaccccaagacggggttgaccctggagcgtgtgggccctgaaagcagcccttacctctcgcggcgccaccgcggccagggccaggagggcgagcactaccacagctgcgtgcagctggccccgacgcgaggcctggaggagctgggccacggccccctgagcttggccggtggccctcgggtgggcggggtggcggccgcggccactgaagcaccgcgcatggagtggaaagtgaaggtgcgcagcgacggaacccgctacgtggccaagcggcccgtgcgagatcggctgctgaaagcccgtgccctgaagatccgggaggagcgcagcggtatgacgaccgacgacgacgcggtgagcgagatgaagatgggccgctactggagcaaggaggagcggaagcagcacctgatccgggcccgtgagcagcggaagcggcgcgagttcatgatgcagagccggctggagtgcctgcgggagcagcagaatggcgacagcaagcccgagctcaacatcattgccctgagccaccgcaaaaccatgaagaagcggaacaagaagatcctggacaactggatcaccatccaggagatgctggcccacggcgcgcgctccgccgatggcaagcgggtctacaaccctcttctctcagtcaccaccgtgtga

SEQ ID NO: 762 - DNA, 1638 bp, Homo Sapiens
atggccatgatggtgtttccgcgggaggagaagctgagccaggatgagatcgtgctgggcaccaaggctgtcatccagggactggagactctgcgtggggagcatcgtgccctgctggctcctctggttgcacctgaggccggcgaagccgagcctggctcgcaggagcgctgcatcctcctgcgtcgctccctggaagccattgagcttgggctgggggaggcccaggaggagaagggggacgtccccaaagacacactggatgacctgttccccaatgaggatgagcagagcccagcccctagcccaggaggaggggatgtgtctggtcagcatgggggctacgagatcccggcccggctccgcaccctgcacaacctggtgatccaatacgcctcacagggccgctacgaggtagctgtgccactctgcaagcaggcactcgaagacctggagaagacgtcaggccacgaccaccctgacgttgccaccatgctgaacatcctggcactggtctatcgggatcagaacaagtacaaggaggctgcccacctgctcaatgatgctctggccatccgggagaaaacactgggcaaggaccacccagccgtggctgcgacactaaacaacctggcagtcctgtatggcaagaggggcaagtacaaggaggctgagccattgtgcaagcgggcactggagatccgggagaaggtcctgggcaagtttcacccagatgtggccaagcagctcagcaacctggccctgctgtgccagaaccagggcaaagctgaggaggtggaatattactatcggcgggcactggagatctatgctacacgcctcgggcccgatgaccccaatgtggccaagaccaagaacaacctggcttcctgctacctgaagcagggcaagtaccaggatgcggagaccttgtacaaggagatcctcacccgcgctcatgagaaagagtttggctctgtcaatggggacaacaagcccatctggatgcacgcagaggagcgggaggaaagcaaggataagcgccgggacagcgccccctatggggaatacggcagctggtacaaggcctgtaaagtagacagccccacagtcaacaccaccctgcgcagcttgggggccctataccggcgccagggcaagctggaagccgcgcacacactagaggactgtgccagccgtaaccgcaagcagggtttggaccccgcaagccagaccaaggtggtagaactgctgaaagatggcagtggcaggcggggagaccgccgcagcagccgagacatggctgggggtgccgggcctcggtctgagtctgacctcgaggacgtgggacctacagctgagtggaatggggatggcagtggctccttgaggcgcagcggttcctttgggaaactccgggatgccctgaggcgcagcagtgagatgctggtaaagaagctgcaggggggcaccccccaggagccccctaaccccaggatgaagcgggccagttccctcaacttcctcaacaagagcgtggaagagccgacccagcctggaggcacaggtctctctgacagccgcactctcagctccagctccatggacctctcccgacgaagctccctggtgggctaa

SEQ ID NO: 763 - DNA, 648 bp, Homo Sapiens
atggaaaaactctacagtgaaaatgaaggaatggcttcaaaccaaggaaagatggaaaatgaagaacagccacaagacgagagaaagccagaagtaacttgtactctggaagacaagaagttagaaaacgagggaaagacagaaaacaagggcaaaacaggagatgaggaaatgttaaaggataaaggaaagccagagagtgagggagaggcaaaagaaggaaagtcagagagggagggagagtcagagatggagggaggatcagagagagagggaaaaccagagatagagggaaagccagagagtgaaggagagccagggagtgaaacaagggctgcaggaaagcgcccagctgaggatgatgtacccaggaaagccaaaagaaaaactaataaggggctggctcattacctcaaggagtataaagaggccatacatgatatgaatttcagcaatgaggacatgataagagaatttgacaatatggctaaggtgcaggatgagaagagaaaaagcaaacagaaattgggggcgtttttgtggatgcaaagaaatttacaggaccccttctaccctagaggtccaagggaattcaggggtggctgcagggccccacgaagggacattgaagacattccttatgtgtag

SEQ ID NO: 764 - DNA, 600 bp, Homo Sapiens
atgaagtgggagcgaggctccccaatggtgcttttggctttagtgtacgatgtttgctgtgcttcccgccgtggagggcagagccaccccacatcaggatcggacgtgctacccctcccggtcccggccctggcccagccagcccagccctcgaggctcgatgcctgtgccagggccaggggcagccagagggcagctggatggccacgtgcaggggtcaaggctgggccccgcagtggggcgggccgccagccccagcagtttacagacgcatggctcttcctcccagagcagccggcagctacctggaccggaaatgtcctcatcccctccctggggccaggctctgccctggccttcctctgtgaacccctcctttctttgtgctggtgtctgggaccaaaaagggggaatatgggagggcagagtggggaggggagtccatgggcctggggccccaagccggggcgtctgagctccccaggcatgaccaaacctcagtggaggggcctctgcttcaggccccgcctggctgacattctgagcccccctcggaggccccgccacagccaacctgcccagtctttcctctgggcttga

SEQ ID NO: 765 - DNA, 1137 bp, Homo Sapiens
atggatcctggggacgactggctggtggaatccttgcgcttgtaccaggatttctatgcattcgacctgtcaggagccactcgagtccttgaatggattgatgacaaaggagtctttgttgctggctatgaaagcctgaaaaagaatgaaattcttcatctgaaattacctctcagactttctgtaaaggaaaacaagggcttattcccagaaagagatttcaaagtgcgccatggaggattttcagacaggtctatctttgatctaaagcatgtgccacataccagattgctggttaccagtggccttccaggttgttatctgcaggtgtggcaggttgcagaggacagtgatgtcattaaagctgtcagcaccattgctgtgcatgagaaagaggagagtctctggcctagggtggccgtcttctccacattggcacccggagtcctccatggggcgaggctccgaagtctgcaggtcgttgatctggagtcccggaagaccacgtacacctcagatgtcagtgacagtgaggagctgagtagcctgcaggtcctagatgcagacacctttgccttctgctgtgcttcaggccggctggggcttgttgacacccggcagaagtgggcaccgttggagaatcgcagccctggccctgggtctggtggagagagatggtgtgctgaagttgggagctggggccagggccctgggcccagcattgccagccttggctcagatgggcgtctttgtcttcttgacccccgggatctctgccatcctgtgagctcagtccagtgcccagtatccgtacctagccctgacccagagctgctgcgagtgacttgggccccaggcctgaagaattgcttggccatctcaggttttgatggtacagtccaggtctatgatgccacatcttgggatggaacacggagccaagatggaacacggagccaagtagaacctctcttcactcacagaggtcacatcttcctagatggaaatgggatggaccctgctcctttggtcaccacccacacctggcatccctgcagaccaaggactttgttatcagcaacaaatgatgcctctctgcatgtgtgggactgggtggacctttgtgccccccgctga

SEQ ID NO: 766 - DNA, 2244 bp, Homo Sapiens
atggagacggcggagaaggagtgcggcgccctgggcgggctcttccaggccatagtcaacgacatgaagagctcctaccctatctgggaggacttcaactccaaggccacgaagctgcattcccagctgaggaccaccgtgctggctgctgtggccttcctggatgccttccagaaagtggctgacatggctaccaacacccgaggggccacgagggacatcggctcggcgctcacacgcatgtgcatgcgccaccgcagcatcgagaccaagctgcggcagttcaccaacgcactgctggagagcctcatcaacccgctgcaggagcgcatcgaggactggaagaaggcggccaaccagctggacaaggaccacgcgaaagagtacaaacgagcccggcatgagatcaaaaagaagtcgtcggacacgctgaagctgcagaagaaggcgcgcaaagagctacttgggaaaggagacctgcagccccagctggacagtgccctgcaggacgtcaacgacatgtacctgctgctggaggagacggagaagcaggccgtgcgccgggcgctgatcgaggagcggggccgcttctgcaccttcatcaccttcctgcagcctgtggtgaatggagagctgaccatgctgggagagatcacccacctgcagggcatcatcgacgacttggtggtgctgacagcagaaccccacaaactgcctcccgccagcgagcaggtaatcaaagacctaaagggctcggactacagctggtcctaccagaccccaccctcatcacccagcagctccagctcccggaagtccagcatgtgcagtgcccccagcagcagtagcagtgccaagggtggcggagccccatggcctgggggtgcccaaacatactcacccagttccacctgtcgctaccgcagcctggcgcagccagccaccaccaccgctcgcctctccagcgtttcctcccatgactctggcttcgtctcccaggacgccacctactccaagcccccctcgcctatgccttcagacatcaccagccagaagtcctccagctctgcatcttccgaggcctcggaaacctgccagtccgttagcgagtgcagctcccccacctcggactggtccaaggtcggctcccatgagcagccctcaggcgccactctgcagcggaggaaggaccgagtggagctcctgcgagacacagagccaggccctgccagtgggggcaccctgggccccagcggggaagaggcaccgcgaccccggatgtcccctgccaccatcgcagccaagcacggtgaggaggtgtcccccgccgccagtgacctggccatggtgctgacgcggggcctgagcctggagcaccagaagagcagccgggactcgctgcagtactccagcggctacagcacgcagaccaccacgccctcctgctctgaggacaccatcccctcccaaggctccgactacgactgctactccgtgaatggggatgcggacagcgagggcccgcccgagtttgacaagtcatccaccatcccgcgcaacagcaacatcgcccagaactaccgccgcctgatccagaccaagcgcccagcctccactgctgggctgcccaccgcggggctgcccacggccactggcctgccctcgggcgcaccccccggcgtggccaccatccgccgcacaccctccaccaagcccaccgtgcgccgcgccctgtccagcgctggccccatccccatccggccgcccatcgtccctgtgaagacgcccacggtgcctgactcccccggctacatggggcccacacgggcgggcagtgaggagtgcgtcttctataccgacgagaccgcctcacccctggcaccggacctcgccaaggcctccccaaagaggctcagcctgcccaacacagcctggggcagcccatccccagaggcagccgggtaccccggggcaggggccgaggacgagcagcagcagctggcggccaaccggcacagcctggtggagaagctgggggagctggtggcgggtgcccacgcactgggtgagggccagttccccttccccactgctctgtcggccacccccacggaggagacgcccaccccacccccagccgccaccagcgaccccccggccgaagacatgctggtggccatccggcgtggggtccggctccgcaggaccgtcaccaacgacaggtcggcgccccgcatcttatga

SEQ ID NO: 767 - DNA, 1023 bp, Homo Sapiens
atggcagccagcagctctgagatctctgagatgaagggggttgaggagagtcccaaggttccaggcgaagggcctggccattctgaagctgaaactggccctccccaggtcctagcaggggtaccagaccagccagaggccccgcagccaggtccaaacaccactgcggcccctgtggactcagggcccaaggctgggctggctccagaaaccacagagaccccggctggggcctcagaaacagcccaggccacagacctcagcttaagcccaggaggggaatcaaaggccaactgcagccccgaagacccatgccaagaaacagtgtccaaaccagaagtgagcaaagaggccactgcagaccaggggtccaggctggagtctgcagccccacctgaaccagccccagagcctgctccccaaccagacccccggccagattcccagcctacccccaagccagcccttcaaccagagctccctacccaggaggaccccacccctgagattctgtctgagagtgtaggggaaaagcaagagaatggggcagtggtgcccctgcaggctggtgatggggaagagggcccagcccctgagcctcactcaccaccctcaaaaaaatcccccccagccaatggggcccccccccgagtgctgcagcagctggttgaggaggatcgaatgagaagggcacacagtgggcatccaggatctccccgaggtagcctgagccgccaccccagctcccagctggcaggtcctggggtggaggggggtgaaggcacccagaaacctcgggactacatcatccttgccatcctgtcctgcttctgccccatgtggcctgtcaacatcgtggccttcgcttatgctgtcatgtcccggaacagcctgcagcagggggacgtggacggggcccagcgtctgggccgggtagccaagctcttaagcatcgtggcgctggtggggggagtcctcatcatcatcgcctcctgcgtcatcaacttaggcgtgtataagtga

SEQ ID NO: 768 - DNA, 648 bp, Homo Sapiens
atgccgttccacccggtgacggcggcgttgatgtaccggggcatctacaccgtgcccaacctgctgtcggagcagcgcccggtggacatcccggaggacgagctggaggagatccgagaggccttcaaggtgtttgaccgtgacggcaatggcttcatctccaagcaggagctgggcacagccatgcgctcactgggttacatgcccaacgaggtggagctggaggtcatcatccagcggctggacatggatggtgatggtcaagtggactttgaggagtttgtgacccttctgggacccaaactctccacctcagggatcccagagaagttccatggcaccgactttgatactgtcttctggaagtgcgacatgcagaagctgacggtggatgagctgaagcggctgctctacgacaccttctgcgagcacctgtccatgaaggacatagagaacatcatcatgacggaggaggagagccacctgggcacagccgaggagtgtcccgtggatgtggagacctgctccaaccagcagatccgccagacttgcgtgcgcaagagtctcatctgcgccttcgccatcgccttcatcatcagtgtcatgctcattgcggccaaccaggtgctgcgcagtggcatgaagtag

SEQ ID NO: 769 - DNA, 1212 bp, Homo Sapiens
atggaggaggagcgggggtcggcgctggcggccgagtcggcgctggagaagaacgtggccgagctgaccgtcatggacgtgtacgacatcgcgtcgcttgtgggccacgagttcgagcgggtcattgaccagcacggctgcgaggccatcgcgcgcctcatgcccaaggtcgtgcgcgtcctggagatcctggaggtgctggtcagccgccaccacgtcgcgcccgagctggacgagctgcgcctggagctggaccgcctgcgcctggagaggatggaccgcatcgagaaggagcgcaagcaccagaaggagctggagctggtggaggatgtgtggcgaggggaggcgcaggacctcctctcccagatcgcccagctgcaggaggagaacaagcagctcatgaccaacctctcccacaaggatgtcaatttctcagaggaggagttccagaagcatgaaggcatgtcagagcgggagcgacaggtgatgaagaagctgaaggaggtggtggacaaacaacgcgacgagatccgcgccaaggacagggagctgggcctgaaaaatgaggacgttgaggctttacagcagcagcagacacggctgatgaagatcaaccatgaccttcggcaccgggtcacggtggtggaggcccaggggaaagccctgatcgaacagaaggtggagctggaggcagacctgcagaccaaggagcaggagatgggcagcctgcgagcagagctggggaagttgcgagagaggctgcagggggagcacagccagaatggggaggaggagcctgagacggagccggtgggagaggagagcatctccgacgcagagaaggtggccatggatctcaaggaccccaaccgcccccggttcaccctgcaggagctgcgggacgtgctgcacgagaggaacgagctcaagtccaaggtgttcttgctgcaggaggagctggcttactataagagtgaagaaatggaagaggaaaaccgaataccccaacccccacccatcgcccacccgaggacgtccccccagccggagtcgggcatcaagcgactgtttagcttcttctcccgagataagaagcgcctggccaacacacagagaaacgtgcacatccaggagtcctttggacagtgggcaaacacccaccgcgatgacggttacacagagcaaggacaggaagccctgcagcatctgtga

SEQ ID NO: 770 - DNA, 615 bp, Homo Sapiens
atggctgagcaggagcccacagccgagcagctggcccagattgcagcggagaacgaggaggatgagcactcggtcaactacaagcccccggcccagaagagcatccaggagatccaggagctggacaaggacgacgagagcctgcgaaagtacaaggaggccctgctgggccgcgtggccgtttccgcagaccccaacgtccccaacgtcgtggtgactggcctgaccctggtgtgcagctcggccccgggccccctggagctggacctgacgggcgacctggagagcttcaagaagcagtcgtttgtgctgaaggagggtgtggagtaccggataaaaatctctttccgggttaaccgagagatagtgtccggcatgaagtacatccagcatacgtacaggaaaggcgtcaagattgacaagactgactacatggtaggcagctatgggccccgggccgaggagtacgagttcctgacccccgtggaggaggcacccaagggtatgctggcccggggcagctacagcatcaagtcccgcttcacagacgacgacaagaccgaccacctgtcctgggagtggaatctcaccatcaagaaggactggaaggactga

SEQ ID NO: 771 - DNA, 1239 bp, Homo Sapiens
atgcagccctccagccttctgccgctcgccctctgcctgctggctgcacccgcctccgcgctcgtcaggatcccgctgcacaagttcacgtccatccgccggaccatgtcggaggttgggggctctgtggaggacctgattgccaaaggccccgtctcaaagtactcccaggcggtgccagccgtgaccgaggggcccattcccgaggtgctcaagaactacatggacgcccagtactacggggagattggcatcgggacgcccccccagtgcttcacagtcgtcttcgacacgggctcctccaacctgtgggtcccctccatccactgcaaactgctggacatcgcttgctggatccaccacaagtacaacagcgacaagtccagcacctacgtgaagaatggtacctcgtttgacatccactatggctcgggcagcctctccgggtacctgagccaggacactgtgtcggtgccctgccagtcagcgtcgtcagcctctgccctgggcggtgtcaaagtggagaggcaggtctttggggaggccaccaagcagccaggcatcaccttcatcgcagccaagttcgatggcatcctgggcatggcctacccccgcatctccgtcaacaacgtgctgcccgtcttcgacaacctgatgcagcagaagctggtggaccagaacatcttctccttctacctgagcagggacccagatgcgcagcctgggggtgagctgatgctgggtggcacagactccaagtattacaagggttctctgtcctacctgaatgtcacccgcaaggcctactggcaggtccacctggaccaggtggaggtggccagcgggctgaccctgtgcaaggagggctgtgaggccattgtggacacaggcacttccctcatggtgggcccggtggatgaggtgcgcgagctgcagaaggccatcggggccgtgccgctgattcagggcgagtacatgatcccctgtgagaaggtgtccaccctgcccgcgatcacactgaagctgggaggcaaaggctacaagctgtccccagaggactacacgctcaaggtgtcgcaggccgggaagaccctctgcctgagcggcttcatgggcatggacatcccgccacccagcgggccactctggatcctgggcgacgtcttcatcggccgctactacactgtgtttgaccgtgacaacaacagggtgggcttcgccgaggctgcccgcctctag

SEQ ID NO: 772 - DNA, 1314 bp, Homo Sapiens
atggccttggccggggcccctgcgggcggcccatgcgcgccggcgctggaggccctgctcggggccggcgcgctgcggctgctcgactcctcgcagatcgtcatcatctccgccgcgcaggacgccagcgccccgccggctcccaccggccccgcggcgcccgccgccggcccctgcgaccctgacctgctgctcttcgccacaccgcaggcgccccggcccacacccagtgcgccgcggcccgcgctcggccgcccgccggtgaagcggaggctggacctggaaactgaccatcagtacctggccgagagcagtgggccagctcggggcagaggccgccatccaggaaaaggtgtgaaatccccgggggagaagtcacgctatgagacctcactgaatctgaccaccaagcgcttcctggagctgctgagccactcggctgacggtgtcgtcgacctgaactgggctgccgaggtgctgaaggtgcagaagcggcgcatctatgacatcaccaacgtccttgagggcatccagctcattgccaagaagtccaagaaccacatccagtggctgggcagccacaccacagtgggcgtcggcggacggcttgaggggttgacccaggacctccgacagctgcaggagagcgagcagcagctggaccacctgatgaatatctgtactacgcagctgcgcctgctctccgaggacactgacagccagcgcctggcctacgtgacgtgtcaggaccttcgtagcattgcagaccctgcagagcagatggttatggtgatcaaagcccctcctgagacccagctccaagccgtggactcttcggagaactttcagatctcccttaagagcaaacaaggcccgatcgatgttttcctgtgccctgaggagaccgtaggtgggatcagccctgggaagaccccatcccaggaggtcacttctgaggaggagaacagggccactgactctgccaccatagtgtcaccaccaccatcatctcccccctcatccctcaccacagatcccagccagtctctactcagcctggagcaagaaccgctgttgtcccggatgggcagcctgcgggctcccgtggacgaggaccgcctgtccccgctggtggcggccgactcgctcctggagcatgtgcgggaggacttctccggcctcctccctgaggagttcatcagcctttccccaccccacgaggccctcgactaccacttcggcctcgaggagggcgagggcatcagagacctcttcgactgtgactttggggacctcacccccctggatttctga

SEQ ID NO: 773 - DNA, 2358 bp, Homo Sapiens
atgcttgtcgccggtcttcttctctgggcttccctactgaccggggcctggccatccttccccacccaggaccacctcccggccacgccccgggtccggctctcattcaaagagctgaaggccacaggcaccgcccacttcttcaacttcctgctcaacacaaccgactaccgaatcttgctcaaggacgaggaccacgaccgcatgtacgtgggcagcaaggactacgtgctgtccctggacctgcacgacatcaaccgcgagcccctcattatacactgggcagcctccccacagcgcatcgaggaatgcgtgctctcaggcaaggatgtcaacggcgagtgtgggaacttcgtcaggctcatccagccctggaaccgaacacacctgtatgtgtgcgggacaggtgcctacaaccccatgtgcacctatgtgaaccgcggacgccgcgcccaggccacaccatggacccagactcaggcggtcagaggccgcggcagcagagccacggatggtgccctccgcccgatgcccacagccccacgccaggattacatcttctacctggagcctgagcgactcgagtcagggaagggcaagtgtccgtacgatcccaagctggacacagcatcggccctcatcaatgaggagctctatgctggtgtgtacatcgattttatgggcactgatgcagccatcttccgcacacttggaaagcagacagccatgcgcacggatcagtacaactcccggtggctgaacgacccgtcgttcatccatgctgagctcattcctgacagtgcggagcgcaatgatgataagctttacttcttcttccgtgagcggtcggcagaggcgccgcagagccccgcggtgtacgcccgcatcgggcgcatttgcctgaacgatgacggtggtcactgttgcctggtcaacaagtggagcacattcctgaaggcgcggctcgtctgctctgtcccgggcgaggatggcattgagactcactttgatgagctccaggacgtgtttgtccagcagacccaggacgtgaggaaccctgtcatttacgctgtctttacctcctctggctccgtgttccgaggctctgccgtgtgtgtctactccatggctgatattcgcatggtcttcaacgggccctttgcccacaaagaggggcccaactaccagtggatgcccttctcagggaagatgccctacccacggccgggcacgtgccctggtggaaccttcacgccatctatgaagtccaccaaggattatcctgatgaggtgatcaacttcatgcgcagccacccactcatgtaccaggccgtgtaccctctgcagcggcggcccctggtagtccgcacaggtgctccctaccgccttaccactattgccgtggaccaggtggatgcagccgacgggcgctatgaggtgcttttcctgggcacagaccgcgggacagtgcagaaggtcattgtgctgcccaaggatgaccaggagttggaggagctcatgctggaggaggtggaggtcttcaaggatccagcacccgtcaagaccatgaccatctcttctaagaggcaacaactctacgtggcgtcagccgtgggtgtcacacacctgagcctgcaccgctgccaggcgtatggggctgcctgtgctgactgctgccttgcccgggacccttactgtgcctgggatggccaggcctgctcccgctatacagcatcctccaagaggcggagccgccggcaggacgtccggcacggaaaccccatcaggcagtgccgtgggttcaactccaatgccaacaagaatgccgtggagtctgtgcagtatggcgtggccggcagcgcagccttccttgagtgccagccccgctcgccccaagccactgttaagtggctgttccagcgagatcctggtgaccggcgccgagagattcgtgcagaggaccgcttcctgcgcacagagcagggcttgttgctccgtgcactgcagctcagcgatcgtggcctctactcctgcacagccactgagaacaactttaagcacgtcgtcacacgagtgcagctgcatgtactgggccgggacgccgtccatgctgccctcttcccaccactgtccatgagcgccccgccacccccaggcgcaggccccccaacgcctccttaccaggagttagcccagctgctggcccagccagaagtgggcctcatccaccagtactgccagggttactggcgccatgtgccccccagccccagggaggctccaggggcaccccggtctcctgagccccaggaccagaaaaagccccggaaccgccggcaccaccctccggacacatga

SEQ ID NO: 774 - DNA, 4440 bp, Homo Sapiens
atggccaagcgctccaggggccccgggcgccgctgcctgttggcgctcgtgctgttctgcgcctgggggacgctggccgtggtggcccagaagccgggcgcagggtgtccgagccgctgcctgtgcttccgcaccaccgtgcgctgcatgcatctgctgctggaggccgtgcccgccgtggcgccgcagacctccatcctagatcttcgctttaacagaatcagagagatccaacctggggcattcaggcggctgaggaacttgaacacattgcttctcaataataatcagatcaagaggatacctagtggagcatttgaagacttggaaaatttaaaatatctctatctgtacaagaatgagatccagtcaattgacaggcaagcatttaagggacttgcctctctagagcaactatacctgcactttaatcagatagaaactttggacccagattcgttccagcatctcccgaagctcgagaggctatttttgcataacaaccggattacacatttagttccagggacatttaatcacttggaatctatgaagagattgcgactggactcaaacacacttcactgcgactgtgaaatcctgtggttggcggatttgctgaaaacctacgcggagtcggggaacgcgcaggcagcggccatctgtgaatatcccagacgcatccagggacgctcagtggcaaccatcaccccggaagagctgaactgtgaaaggccccggatcacctccgagccccaggacgcagatgtgacctcggggaacaccgtgtacttcacctgcagagccgaaggcaaccccaagcctgagatcatctggctgcgaaacaataatgagctgagcatgaagacagattcccgcctaaacttgctggacgatgggaccctgatgatccagaacacacaggagacagaccagggtatctaccagtgcatggcaaagaacgtggccggagaggtgaagacgcaagaggtgaccctcaggtacttcgggtctccagctcgacccacttttgtaatccagccacagaatacagaggtgctggttggggagagcgtcacgctggagtgcagcgccacaggccaccccccgccgcggatctcctggacgagaggtgaccgcacacccttgccagttgacccgcgggtgaacatcacgccttctggcgggctttacatacagaacgtcgtacagggggacagcggagagtatgcgtgctctgcgaccaacaacattgacagcgtccatgccaccgctttcatcatcgtccaggctcttcctcagttcactgtgacgcctcaggacagagtcgttattgagggccagaccgtggatttccagtgtgaagccaagggcaacccgccgcccgtcatcgcctggaccaagggagggagccagctctccgtggaccggcggcacctggtcctgtcatcgggaacacttagaatctctggtgttgccctccacgaccagggccagtacgaatgccaggctgtcaacatcatcggctcccagaaggtcgtggcccacctgactgtgcagcccagagtcaccccagtgtttgccagcattcccagcgacacaacagtggaggtgggcgccaatgtgcagctcccgtgcagctcccagggcgagcccgagccagccatcacctggaacaaggatggggttcaggtgacagaaagtggaaaatttcacatcagccctgaaggattcttgaccatcaatgacgttggccctgcagacgcaggtcgctatgagtgtgtggcccggaacaccattgggtcggcctcggtgagcatggtgctcagtgtgaatgttcctgacgtcagtcgaaatggagatccgtttgtagctacctccatcgtggaagcgattgcgactgttgacagagctataaactcaacccgaacacatttgtttgacagccgtcctcgttctccaaatgatttgctggccttgttccggtatccgagggatccttacacagttgaacaggcacgggcgggagaaatctttgaacggacattgcagctcattcaggagcatgtacagcatggcttgatggtcgacctcaacggaacaagttaccactacaacgacctggtgtctccacagtacctgaacctcatcgcaaacctgtcgggctgtaccgcccaccggcgcgtgaacaactgctcggacatgtgcttccaccagaagtaccggacgcacgacggcacctgtaacaacctgcagcaccccatgtggggcgcctcgctgaccgccttcgagcgcctgctgaaatccgtgtacgagaatggcttcaacacccctcggggcatcaacccccaccgactgtacaacgggcacgcccttcccatgccgcgcctggtgtccaccaccctgatcgggacggagaccgtcacacccgacgagcagttcacccacatgctgatgcagtggggccagttcctggaccacgacctcgactccacggtggtggccctgagccaggcacgcttctccgacggacagcactgcagcaacgtgtgcagcaacgaccccccctgcttctctgtcatgatcccccccaatgactcccgggccaggagcggggcccgctgcatgttcttcgtgcgctccagccctgtgtgcggcagcggcatgacttcgctgctcatgaactccgtgtacccgcgggagcagatcaaccagctcacctcctacatagacgcatccaacgtgtacgggagcacggagcatgaggcccgcagcatccgcgacctggccagccaccgcggcctgctgcggcagggcatcgtgcagcggtccgggaagccgctgctccccttcgccaccgggccgcccacggagtgcatgcgggacgagaacgagagccccatcccctgcttcctggccggggaccaccgcgccaacgagcagctgggcctgaccagcatgcacacgctgtggttccgcgagcacaaccgcattgccacggagctgctcaagctgaacccgcactgggacggcgacaccatctactatgagaccaggaagatcgtgggtgcggagatccagcacatcacctaccagcactggctcccgaagatcctgggggaggtgggcatgaggacgctgggagagtaccacggctacgaccccggcatcaatgctggcatcttcaacgccttcgccaccgcggccttcaggtttggccacacgcttgtcaacccactgctttaccggctggacgagaacttccagcccattgcacaagatcacctcccccttcacaaagctttcttctctcccttccggattgtgaatgagggcggcatcgatccgcttctcagggggctgttcggggtggcggggaaaatgcgtgtgccctcgcagctgctgaacacggagctcacggagcggctgttctccatggcacacacggtggctctggacctggcggccatcaacatccagcggggccgggaccacgggatcccaccctaccacgactacagggtctactgcaatctatcggcggcacacacgttcgaggacctgaaaaatgagattaaaaaccctgagatccgggagaaactgaaaaggttgtatggctcgacactcaacatcgacctgtttccggcgctcgtggtggaggacctggtgcctggcagccggctgggccccaccctgatgtgtcttctcagcacacagttcaagcgcctgcgagatggggacaggttgtggtatgagaaccctggggtgttctccccggcccagctgactcagatcaagcagacgtcgctggccaggatcctatgcgacaacgcggacaacatcacccgggtgcagagcgacgtgttcagggtggcggagttccctcacggctacggcagctgtgacgagatccccagggtagacctccgggtgtggcaggactgctgtgaagactgtaggaccagggggcagttcaatgccttttcctatcatttccgaggcagacggtctcttgagttcagctaccaggaggacaagccgaccaagaaaacaagaccacggaaaatacccagtgttgggagacagggggaacatctcagcaacagcacctcagccttcagcacacgctcagatgcatctgggacaaatgacttcagagagtttgttctggaaatgcagaagaccatcacagacctcagaacacagataaagaaacttgaatcacggctcagtaccacagagtgcgtggatgccgggggcgaatctcacgccaacaacaccaagtggaaaaaagatgcatgcaccatttgtgaatgcaaagacgggcaggtcacctgcttcgtggaagcttgcccccctgccacctgtgctgtccccgtgaacatcccaggggcctgctgtccagtctgcttacagaagagggcggaggaaaagccctag

SEQ ID NO: 775 - DNA, 1644 bp, Homo Sapiens
atgttctactatcccaacgtgcttcagcgccacaccggctgctttgccaccatctggctggcggcgactcgcggcagccggttggtgaagcgcgaatacctgagggtgaatgtggtgaaaacctgcgaggaaatcctcaattacgtgctggtacgagtgcaacccccgcagcccggcctgccgcggccccgcttctccctctatctctcagcccaacttcagatcggtgtgatccgcgtctattctcaacaatgccagtacctcgtggaggacatccagcacatcttggagcgcctccaccgtgcccagctgcagatccgaatagatatggagactgagctacccagcctgctgcttcctaaccacctggccatgatggagaccctagaagatgctccagatcccttttttgggatgatgtctgtggatcccagacttcctagtcctttcgatatccctcagattcgacacctcttagaggctgcaatcccagagagagttgaagagatccctcctgaagttcctacagagcccagggagccagagaggattccggtcactgtgctgccacctgaggccatcacgatcctggaggcagagcccatacggatgctggagattgagggtgaacgggagctcccagaggtcagccgccgagaactggacctgctgatcgcagaggaagaagaagctatcttgttagaaatcccgcggctcccacctccagctcctgcagaggtggaaggaataggagaggcactgggtcctgaggagctgaggctgacaggctgggaacctggggccctactcatggaggtgacccccccggaggagctgcgtctgccagccccacccagcccagagaggaggcccccagtccccccacctcctcgccgccgccgtcgtcgccggttactgttctgggacaaggagactcagatctccccggagaaattccaggaacaactgcaaaccagagcccactgctgggaatgtcctatggtgcagccgcccgagaggaccatcagaggccctgcggagttgttcagaaccccaactctctctggctggctaccccctgaactactgggtctctggacccattgtgcccagccacccccaaaagccctcaggcgagagctgcctgaggaggcagccgctgaggaggaaaggagaaagattgaagttccaagtgagattgaggtcccgagggaggccctggagcccagtgttccccttatggtgtctttagagatctccctagaggcagctgaagaggagaagtcccgcatcagcctcatcccaccagaagaacggtgggcctggcctgaggtggaggcgccagaagctcctgcattgcccgtggtgcctgaactccctgaggtgcccatggagatgcctttggtgctgcccccagagctcgagctgctctcactggaagcagtgcacagggcagtggcactggagctgcaggctaacagggagcccgacttcagcagcctggtgtcacctctcagcccccgcaggatggctgcccgggtcttctacctgctcctggtgctctcagcgcaacagattcttcacgtgaaacaagaaaagccatatggtcgcctcctgatccagccggggcccagattccactga

SEQ ID NO: 776 - DNA, 978 bp, Homo Sapiens
atggcggcttcctgtgttctactgcacactgggcagaagatgcctctgattggtctgggtacctggaagagtgagcctggtcaggtaaaagcagctgttaagtatgcccttagcgtaggctaccgccacattgattgtgctgctatctacggcaatgagcctgagattggggaggccctgaaggaggacgtgggaccaggcaaggcggtgcctcgggaggagctgtttgtgacatccaagctgtggaacaccaagcaccaccccgaggatgtggagcctgccctccggaagactctggctgacctccagctggagtatctggacctgtacctgatgcactggccttatgcctttgagcggggagacaaccccttccccaagaatgctgatgggactatatgctacgactccacccactacaaggagacttggaaggctctggaggcactggtggctaaggggctggtgcaggcgctgggcctgtccaacttcaacagtcggcagattgatgacatactcagtgtggcctccgtgcgtccagctgtcttgcaggtggaatgccacccatacttggctcaaaatgagctaattgcccactgccaagcacgtggcctggaggtaactgcttatagccctttgggctcctctgatcgtgcatggcgtgatcctgatgagcctgtcctgctggaggaaccagtagtcctggcattggctgaaaagtatggccgatctccagctcagatcttgctcaggtggcaggtccagcggaaagtgatctgcatccccaaaagtatcactccttctcgaatccttcagaacatcaaggtgtttgacttcacctttagcccagaagagatgaagcagctaaatgccctgaacaaaaattggagatatattgtgcctatgcttacggtggatgggaagagagtcccaagggatgcagggcatcctctgtacccctttaatgacccgtactga

SEQ ID NO: 777 - DNA, 600 bp, Homo Sapiens
atggccctgaacggagctgaagtcgacgacttctcctgggagcccccgactgaggcggagacgaaggtgctgcaggcgcgacgggagcggcaagatcgcatctcccggctcatgggcgactatctgctgcgcggttaccgcatgctgggcgagacgtgtgcggactgcgggacgatcctcctccaagacaaacagcggaaaatctactgcgtggcttgtcaggaactcgactcagacgtggataaagataatcccgctctgaatgcccaggctgccctctcccaagctcgggagcaccagctggcctcagcctcagagctccccctgggctctcgacctgcgccccagcccccagtacctcgtccggagcactgtgagggagctgcagcaggactcaaggcagcccaggggccacctgctcctgctgtgcctccaaatacagatgtcatggcctgcacacagacagccctcttgcagaagctgacctgggcctctgctgaactgggctccagcacctccctggagactagcatccagctgtgtggccttatccgcgcatgtgcggaggccctgcgcagcctgcagcagctacagcactaa

SEQ ID NO: 778 - DNA, 537 bp, Homo Sapiens
atgtcggaggtgcggctgccaccgctacgcgccctggacgactttgttctggggtcggcgcgtctggcggctccggatccatgcgacccgcagcgatggtgccaccgcgtcatcaacaacctcctctactaccaaaccaactaccttctctgcttcggcatcggcctcgctctcgccgggtacgtgcggccacttcatacgctcctgagcgcgctggtagtggcggtggccctcggcgtgctggtgtgggcagctgagacccgcgcagctgtgcgccgctgccgccgcagccaccctgcagcctgcctggccgcagtgcttgccgtcggcctcctggtgctctgggtcgcgggcggcgcttgcaccttcctgttcagcatcgccgggccggtgcttctgatcctggtgcacgcctcgttgcgcctgcgcaaccttaagaacaagattgagaacaagatcgagagcattggtctcaagcggacgccaatgggcctgctactagaggcactgggacaagagcaggaggctggatcctag

SEQ ID NO: 779 - DNA, 411 bp, Homo Sapiens
atggcgggggctggttccgccgctgtatcgggggcagggaccccggtggcggggcccacaggccgcgaccttttcgccgaagggctgctggagttcctgcgacccgctgtgcagcagctcgactctcacgtacacgccgtcagagagagccaggtagagctccgggaacaaattgacaacctagccacagaactgtgccgcataaatgaggatcagaaggtggccctggatcttgacccctatgttaagaagctacttaatgcccggcgacgcgttgtcttggttaacaacattctacagaatgctcaggaacgactgagacggctaaaccacagtgttgccaaggaaacagcccgcaggagagcaatgctggattcgggaatttacccccctggctccccaggcaaataa

SEQ ID NO: 780 - DNA, 1329 bp, Homo Sapiens
atggcgagtgtagtgctgccgagcggatcccagtgtgcggcggcagcggcggcggcggcgcctcccgggctccggctccggcttctgctgttgctcttctccgccgcggcactgatccccacaggtgatgggcagaatctgtttacgaaagacgtgacagtgatcgagggagaggttgcgaccatcagttgccaagtcaataagagtgacgactctgtgattcagctactgaatcccaacaggcagaccatttatttcagggacttcaggcctttgaaggacagcaggtttcagttgctgaatttttctagcagtgaactcaaagtatcattgacaaacgtctcaatttctgatgaaggaagatacttttgccagctctataccgatcccccacaggaaagttacaccaccatcacagtcctggtcccaccacgtaatctgatgatcgatatccagaaagacactgcggtggaaggtgaggagattgaagtcaactgcactgctatggccagcaagccagccacgactatcaggtggttcaaagggaacacagagctaaaaggcaaatcggaggtggaagagtggtcagacatgtacactgtgaccagtcagctgatgctgaaggtgcacaaggaggacgatggggtcccagtgatctgccaggtggagcaccctgcggtcactggaaacctgcagacccagcggtatctagaagtacagtataagcctcaagtgcacattcagatgacttatcctctacaaggcttaacccgggaaggggacgcgcttgagttaacatgtgaagccatcgggaagccccagcctgtgatggtaacttgggtgagagtcgatgatgaaatgcctcaacacgccgtactgtctgggcccaacctgttcatcaataacctaaacaaaacagataatggtacataccgctgtgaagcttcaaacatagtggggaaagctcactcggattatatgctgtatgtatacgatccccccacaactatccctcctcccacaacaaccaccaccaccaccaccaccaccaccaccaccatccttaccatcatcacagattcccgagcaggtgaagaaggctcgatcagggcagtggatcatgccgtgatcggtggcgtcgtggcggtggtggtgttcgccatgctgtgcttgctcatcattctggggcgctattttgccagacataaaggtacatacttcactcatgaagccaaaggagccgatgacgcagcagacgcagacacagctataatcaatgcagaaggaggacagaacaactccgaagaaaagaaagagtacttcatctag

SEQ ID NO: 781 - DNA, 1644 bp, Homo Sapiens
atgactaagacagatcctgccccgatggccccgccaccccgaggagaggaggaagaagaggaggaggaggatgaacccgtccccgaggcccccagccccacccaggagcgccggcagaagcctgttgtgcacccctcggcacctgcccccctccctaaggactacgctttcaccttcttcgatcccaatgacccggcgtgccaggagatcctgtttgaccctcagaccaccatccccgagctgtttgccattgtgcgccagtgggtgccccaagtccagcacaagatagacgtcatcggcaatgagattctgcgccgaggctgccatgtgaacgatcgtgacgggctgaccgacatgacactgctccactatgcgtgcaaagctggggcccacggagtcggggaccccgcggcagccgtgcgcctctcgcagcagctgctggcgctgggcgcagatgtgacgctgcgcagccgctggaccaacatgaacgcgcttcactacgcggcctattttgatgtgcccgacctcgtgcgtgtgctgctgaagggtgcgaggccgcgagtggtgaactccacgtgcagtgacttcaaccacggctcagccctgcacatcgctgcttccagcctgtgcctgggcgccgccaaatgtttgctggagcacggcgccaaccctgcgctgaggaatcgaaaaggacaggtgccggcggaggtggtcccagatcctatggacatgtccctggacaaggcagaggcggcactggtggccaaggagctgcggacgcttctggaagaggcagtgccactatcttgcgccctccccaaggtcacgctacccaactatgacaacgtcccaggcaatctcatgcttagcgcactgggcttgcgcctgggagaccgcgtgctgctggatggccagaagacgggcacactgcggttctgtgggaccacggagtttgccagcggccagtgggtgggcgtggagctggacgaacctgagggcaagaacgatggcagcgttgggggcgttcggtacttcatctgccctcccaagcagggtctctttgcctccgtgtccaagatctccaaggcagtggacgcacccccctcctctgtcacctccacaccccggaccccccggatggacttctcccgtgtcaccggcaaaggccgcagggaacacaaaggcaagaagaagaccccatcatccccatctctgggcagcttgcagcagcgtgacggggccaaggctgaggttggagaccaggtccttgtcgcgggccagaagcaggggatcgtgcgcttctacgggaagacagactttgccccaggttactggtatggcattgagctggaccagcccacaggcaagcatgatggctctgtcttcggtgtccggtacttcacttgccccccgaggcatggggtcttcgcaccagcatcccgtattcagaggattggcggatccactgattcccccggggacagcgttggagccaaaaaagtgcatcaagtgacaatgacgcagcccaaacgcaccttcaccacagtccggaccccaaaggacattgcatcagagaactccatttccaggttgctgttctgctgctggttcccctggatgctgagggcggagatgcagtcttag

SEQ ID NO: 782 - DNA, 849 bp, Homo Sapiens
atgtcgggttcgtcgctgcccagcgccctggccctctcgctgttgctggtctctggctccctcctcccagggccaggcgccgctcagaacgagccaaggattgtcaccagtgaagaggtcattattcgagacagccctgttctccctgtcaccctgcagtgtaacctcacctccagctctcacacccttacatacagctactggacaaagaatggggtggaactgagtgccactcgtaagaatgccagcaacatggagtacaggatcaataagccgagagctgaggattcaggcgaataccactgcgtatatcactttgtcagcgctcctaaagcaaacgccaccattgaagtgaaagccgctcctgacatcactggccataaacggagtgagaacaagaatgaagggcaggatgccactatgtattgcaagtcagttggctacccccacccagactggatatggcgcaagaaggagaacgggatgcccatggacattgtcaatacctctggccgcttcttcatcatcaacaaggaaaattacactgagttgaacattgtgaacctgcagatcacggaagaccctggcgagtatgaatgtaatgccaccaacgccattggctccgcctctgttgtcactgtcctcagggtgcggagccacctggccccactctggcctttcttgggaattctggctgaaattatcatccttgtggtgatcattgttgtgtatgagaagaggaagaggccagatgaggttcctgacgatgatgaaccagctggaccaatgaaaaccaactctaccaacaatcacaaagataaaaacttgcgccagagaaacacaaattaa

SEQ ID NO: 783 - DNA, 690 bp, Homo Sapiens
atgacaacagcagccaggccaacctttgaacctgccagaggtggaaggggaaaaggagaaggtgatttgagccaactttcaaagcagtattcaagcagagacctaccctctcatacaaagataaaatacagacagactactcaggatgcccctgaagaggttcgtaaccgtgacttcaggagagagttggaagaaagagagagagctgctgcaagagagaaaaatagggatcgtccaacccgagaacatacaacctcctcttcagtgtcaaaaaagccacggttagaccagattcctgccgccaaccttgatgcagatgaccctctaacagatgaggaagatgaagattttgaagaagaaagtgatgatgatgatactgcagctcttcttgcagaactggaaaaaattaaaaaagaaagagctgaagagcaggccaggaaggaacaagaacaaaaagctgaagaagagaggattcgtatggaaaacattctgagcggaaaccctctccttaatctcactggcccatcccagcctcaggccaacttcaaagttaaaagaaggtgggatgatgacgttgtcttcaagaactgtgcaaaaggtgtagatgaccagaagaaagacaaaagatttgtaaatgacacactgcgatctgaatttcacaaaaagttcatggagaaatatattaaatag

SEQ ID NO: 784 - DNA, 474 bp, Homo Sapiens
atgtcagtggaagagaaagccaatacccacctcctcttgggcatgtgcttagacgcctgtgctcgctaccttctgttctccaagcagccgtcacaggcacaaaggatgtatgaaaaagctctgcagatttctgaagaaatacaaggagaaagacacccacagaccattgtgctgatgagtgacctggctactaccctggatgcacagggccgctttgatgaggcctatatttatatgcaaagggcatcagatctggcaagacagataaatcatcctgagctacacatggtactcagtaatctagctgcagttttgatgcacagagaacgatatacacaagcaaaagagatctaccaggaagcactgaagcaagcaaagctgaaaaaagatgaaatttctgtacaacacatcagggaagagttggctaagctgtcaaagaaaagtagacctttgacaaattctgtcaagctctaa

SEQ ID NO: 785 - DNA, 3906 bp, Homo Sapiens
[391 bp omitted]cgatctccagtgctgaagagtttgatgacgacgagaagattgaggtggatgacccccctgacaaggaggacatgcgatcaagcttcaggtcgaatgtgttgacggggtcggctccccagcaggactacgataagctgaaggcactcggaggggaaaactccagcaaaactggactctctacgtcaggcaatgtggagaaaaacaaagctgttaagagagaaacagaagccagttctataaacctgagtgtttatgaaccttttaaagtcagaaaagcagaggataaattgaaggaaagctctgacaaggtgctggaaaacagagtcctagatgggaagctgagctccgagaagaatgacaccagcctccccagcgttgcgccatcaaagacaaagtcgtcctccaagctctcgtcctgcatcgctgccatcgcggctctcagcgctaaaaaggcggcttcagactcctgcaaagaaccagtggccaattcgagggaatcctccccgttaccaaaagaagtaaatgacagtccgagagccgctgacaagtctcctgaatcccagaatctcatcgacgggaccaaaaaaccatccctgaagcaaccggatagtcccagaagcatctcaagtgagaacagcagcaaaggatccccgtcctctcccgcagggtccacaccagcaatccccaaagtccgcataaaaaccattaagacatcttctggggaaatcaagagaacagtgaccagggtattgccagaagtggatcttgactctggaaagaaaccttccgagcagacagcgtccgtgatggcctctgtgacatcccttctgtcgtctccagcatcagccgccgtcctttcctctccccccagggcgcctctccagtctgcggtcgtgaccaatgcagtttcccctgcagagctcacccccaaacaggtcacaatcaagcctgtggctactgctttcctcccagtgtctgctgtgaagacggcaggatcccaagtcattaatttgaagctcgctaacaacaccacggtgaaagccacggtcatatctgctgcctctgtccagagtgccagcagcgccatcattaaagctgccaacgccatccagcagcaaactgtcgtggtgccggcatccagcctggccaatgccaaactcgtgccaaagactgtgcaccttgccaaccttaaccttttgcctcagggtgcccaggccacctctgaactccgccaagtgctaaccaaacctcagcaacaaataaagcaggcaataatcaatgcagcagcctcgcaaccccccaaaaaggtgtctcgagtccaggtggtgtcgtccttgcagagttctgtggtggaagctttcaacaaggtgctgagcagtgtcaatccagtccctgtttacatcccaaacctcagtcctcccgccaatgcagggatcacgttaccgacgcgtgggtacaagtgcttggagtgtggggactcctttgcacttgaaaagagtctgacccagcactacgacagacggagcgtgcgcatcgaagtaacgtgcaaccattgtacaaagaacctcgttttttacaacaaatgcagcctcctttcccatgcccgtgggcataaggagaaaggggtggtaatgcaatgctcccacttaattttaaagccagtcccagcagatcaaatgatagtttctccgtcaagcaatacttccacttcaacttccactcttcagagccctgtgggagctggcacacacactgtcacaaaaattcagtctggcataactgggacagtcatatcggctccttcaagcactcccatcaccccagccatgcccctagatgaagacccctccaaactgtgtagacatagtctaaaatgtttggagtgtaatgaagtcttccaggacgagacatcactggctacacatttccagcaggctgcagatacgagtggacaaaagacttgcactatctgccagatgctgcttcctaaccagtgcagttatgcatcacaccagagaatccatcagcacaaatctccctacacctgccctgagtgtggggccatctgcaggtcggtgcacttccagacccacgtcaccaagaactgtctgcactacacgaggagagttggttttcgatgtgtgcattgcaatgttgtgtactctgatgtggctgctctgaagtctcacattcaaggttctcactgtgaagtcttctacaagtgtcctatttgtccaatggcgtttaagtctgccccaagcacacattcccacgcctacacacagcatcctggcatcaagataggagaaccaaaaataatatataagtgttccatgtgcgacactgtgttcaccctgcaaaccttgctgtatcgccactttgaccaacacattgaaaaccagaaggtgtctgttttcaagtgtccagactgttctcttttatatgcacagaagcaacttatgatggaccatatcaagtctatgcatggaacattgaaaagtattgaagggcctccaaacttgggtataaacttgcctttgagcattaagcctgcaactcaaaattcagcaaatcagaacaaagaggacaccaaatccatgaatgggaaagagaaattggaaaagaaatctccatctcctgtgaaaaaatcaatggaaaccaagaaagtggccagtcctgggtggacgtgttgggagtgtgactgcctgttcatgcagagagatgtgtacatatcccacgtgaggaaggagcacgggaagcaaatgaagaaacacccctgccgccagtgtgacaagtctttcagctcgtcccacagcctgtgccggcacaaccggatcaagcacaaaggcatcaggaaagtgtacgcctgctcgcactgcccagactccagacgtacctttaccaaacgtttgatgctggagaagcacgtccagctgatgcatggcatcaaggaccctgacctgaaagaaatgacagatgccaccaatgaggaggaaacagaaataaaagaagacactaaggtccccagtcccaagcggaagttggaagaaccagttctggagttcaggcctccccgaggagcaatcactcaaccactgaaaaagctgaaaatcaatgtttttaaggttcacaagtgtgccgtgtgtggcttcaccaccgaaaacctgctgcaattccacgaacacatccctcagcacaaatcggatggttcttcctaccagtgccgggagtgtggcctctgctacacgtctcacgtctctctgtccaggcacctcttcatcgtacacaagttaaaggaacctcagccagtgtccaagcaaaatggggctggggaagataaccaacaggagaacaaacccagccacgaggatgaatcccctgatggcgccgtgtcagacagaaagtgcaaagtgtgcgcaaaaacttttgaaactgaagctgccttaaatactcacatgcggacacacggcatggccttcatcaaatccaaaaggatgagctcagccgagaaatag

SEQ ID NO: 786 - DNA, 2481 bp, Homo Sapiens
atggtggcacccgtgctggagacttctcacgtgttttgctgcccaaaccgggtgcggggagtcctgaactggagctctgggcccagaggacttctggcctttggcacgtcctgctccgtggtgctctatgaccccctgaaaagggttgttgttaccaacttgaatggtcacaccgcccgagtcaattgcatacagtggatttgtaaacaggatggctccccttctactgaattagtttctggaggatctgataatcaagtgattcactgggaaatagaggataatcagcttttaaaagcagtgcatcttcaaggccatgaaggacctgtttatgcggtgcatgctgtttaccagaggaggacatcagatcctgcattatgtacactgatcgtttctgcagctgcagattctgctgttcgactctggtctaaaaagggtccagaagtaatgtgccttcagactttaaactttggaaatggatttgctttggctctctgcttatcttttttgccaaatactgatgtaccaatattagcatgtggcaatgatgattgcagaattcacatatttgctcaacaaaatgatcagtttcagaaagtgctttctctctgtggacatgaggattggattagaggagtggaatgggcagcctttggtagagatcttttcctagcaagctgttcacaagattgcctgataagaatatggaagctgtatataaagtcaacatctttagaaactcaggatgacgataacataagactgaaagaaaatacttttaccatagaaaatgaaagtgttaaaatagcatttgctgttactctggagacagtgctagccggtcatgaaaactgggtaaatgcagttcactggcaacctgtgttttacaaagatggtgtcctacagcagccagtgagattattatctgcttccatggataaaaccatgattctctgggctccagatgaagagtcaggagtttggctagaacaggttcgagtaggtgaagtaggtgggaatactttgggattttatgattgccagttcaatgaagatggctccatgatcattgctcatgctttccacggagcgttgcacctttggaaacagaatacagttaacccaagagagtggactccagagattgtcatttcaggacactttgatggtgtccaagacctagtctgggatccagaaggagaatttattatcactgttggtactgatcagacaactagactttttgctccatggaagagaaaagaccaatcacaggtgacttggcatgaaattgcaaggcctcagatacatgggtatgacctgaaatgtttggcaatgattaatcggtttcagtttgtatctggagcagatgaaaaagttcttcgggttttttctgcacctcggaattttgtggaaaatttttgtgccattacaggacaatcactgaatcatgtgctctgtaatcaagatagtgatcttccagaaggagccactgtccctgcattgggattatcaaataaagctgtctttcagggagatatagcttctcagccttctgatgaagaggagctgttaactagtactggttttgagtatcagcaggtggcctttcagccctccatacttactgagcctcccactgaggatcatcttctgcagaatactttgtggcctgaagttcaaaaactatatgggcacggttatgaaatattttgtgttacttgtaacagttcaaagactctgcttgcctcagcttgtaaggcagctaagaaagagcatgcagctatcattctttggaacactacatcttggaaacaggtgcagaatttagttttccacagtttgacagtcacgcagatggccttctcacctaatgagaagttcttactagctgtttccagagatcgaacctggtcattgtggaaaaagcaggatacaatctcacctgagttcgagccagtttttagtctttttgccttcaccaacaaaattacttctgtgcacagtagaattatttggtcttgtgattggagtcctgacagcaagtatttcttcactgggagtcgagacaaaaaggtggttgtctggggtgagtgcgactccactgatgactgtattgagcacaacattggcccctgctcctcagtcctggacgtgggtggggctgtgacagctgtcagcgtctgcccagtgctccacccttctcaacgatacgtggttgcagtaggattggagtgtggaaagatttgcttatatacctggaaaaagactgatcaagttccagaaataaatgactggacccactgtgtagaaacaagtcaaagccaaagtcatacactggctatcagaaaattatgctggaagaattgcagtggaaaaactgaacagaaggaagcagaaggtgctgagtggttacactttgcaagctgtggtgaagatcacactgtgaagatacacagagtcaataaatgtgcactgtaa

SEQ ID NO: 787 - DNA, 2115 bp, Homo Sapiens
atggccaatgagaatcacggcagcccccgggaggaagcgtccctgctgagtcactccccaggtacctccaatcagagccagccctgttctccaaagccaatccgcctggttcaggacctcccagaggagctggtgcatgcaggctgggagaagtgctggagccggagggagaatcgtccctactacttcaaccgattcaccaaccagtccctgtgggagatgcccgtgctggggcagcacgatgtgatttcggaccctttggggctgaatgcgaccccactgccccaagactcaagcttggtggaaactcccccggctgagaacaagcccagaaagcggcagctctcggaagagcagccaagcggcaatggtgtgaagaagcccaagattgaaatcccagtgacacccacaggccagtcggtgcccagctcccccagtatcccaggaaccccaacgctgaagatgtggggtacgtcccctgaagataaacagcaggcagctctcctacgacccactgaggtctactgggacctggacatccagaccaatgctgtcatcaagcaccgggggccttcagaggtgctgcccccgcatcccgaagtggaactgctccgctctcagctcatcctgaagcttcggcagcactatcgggagctgtgccagcagcgagagggcattgagcctccacgggagtctttcaaccgctggatgctggagcgcaaggtggtagacaaaggatctgaccccctgttgcccagcaactgtgaaccagtcgtgtcaccttccatgtttcgtgaaatcatgaacgacattcctatcaggttatcccgaatcaagttccgggaggaagccaagcgcctgctctttaaatatgcggaggccgccaggcggctcatcgagtccaggagtgcatcccctgacagtaggaaggtggtcaaatggaatgtggaagacacctttagctggcttcggaaggaccactcagcctccaaggaggactacatggatcgcctggagcatctgcggaggcagtgtggcccccacgtctcggccgcagccaaggactccgtggaaggcatctgcagtaagatctaccacatctccctggagtacgtcaaacggatccgagagaagcaccttgccatcctcaaggaaaacaacatctcagaggaggtggaggcccctgaggtggagccccgcctagtgtactgctacccagtccggctggctgtgtctgcaccgcccatgcccagcgtggagatgcacatggagaacaacgtggtctgcatccggtataagggagagatggtcaaggtcagccgcaactacttcagcaagctgtggctcctttaccgctacagctgcattgatgactctgcctttgagaggttcctgccccgggtctggtgtcttctccgacggtaccagatgatgttcggcgtgggcctctacgaggggactggcctgcagggatcgctgcctgtgcatgtctttgaggccctccaccgactctttggcgtcagcttcgagtgcttcgcctcacccctcaactgctacttccgccagtactgttctgccttccccgacacagacggctactttggctcccgcgggccctgcctagactttgctccactgagtggttcatttgaggccaaccctcccttctgcgaggagctcatggatgccatggtctctcactttgagagactgcttgagagctcaccggagcccctgtccttcatcgtgttcatccctgagtggcgggaacccccaacaccagcgctcacccgcatggagcagagccgcttcaaacgccaccagttgatcctgcctgcctttgagcatgagtaccgcagtggctcccagcacatctgcaagaaggaggaaatgcactacaaggccgtccacaacacggctgtgctcttcctacagaacgaccctggctttgccaagtgggcgccgacgcctgaacggctgcaggagctgagtgctgcctaccggcagtcaggccgcagccacagctctggttcttcctcatcgtcctcctcggaggccaaggaccgggactcgggccgtgagcagggtcctagccgcgagcctcaccccacttaa

SEQ ID NO: 788 - DNA, 1338 bp, Homo Sapiens
atgctcccctggacggcgctcggcctggccctgagcttgcggctggcgctggcgcggagcggcgcggagcgcggtccaccagcatcagccccccgaggggacctgatgttcctgctggacagctcagccagcgtctctcactacgagttctcccgggttcgggagtttgtggggcagctggtggctccactgcccctgggcaccggggccctgcgtgccagtctggtgcacgtgggcagtcggccatacaccgagttccccttcggccagcacagctcgggtgaggctgcccaggatgcggtgcgtgcttctgcccagcgcatgggtgacacccacactggcctggcgctggtctatgccaaggaacagctgtttgctgaagcatcaggtgcccggccaggggtgcccaaagtgctggtgtgggtgacagatggcggctccagcgaccctgtgggcccccccatgcaggagctcaaggacctgggcgtcaccgtgttcattgtcagcaccggccgaggcaacttcctggagctgtcagccgctgcctcagcccctgccgagaagcacctgcactttgtggacgtggatgacctgcacatcattgtccaagagctgaggggctccattctcgacgcgatgcggccgcagcagctccatgccacggagatcacgtccagcggcttccgcctggcctggccacccctgctgaccgcagactcgggctactatgtgctggagctggtgcccagcgcccagccgggggctgcaagacgccagcagctgccagggaacgccacggactggatctgggccggcctcgacccggacacggactacgacgtggcgctagtgcctgagtccaacgtgcgcctcctgaggccccagatcctgcgggtgcgcacgcggcccggtgaggcagggccgggggcttcgggcccggagtcgggggctgggccggcccccacgcagctcgccgccctccccgccccagaggaggccgggccagagcgcatcgtcatctcccacgcccggccgcgcagcctccgcgtgagttgggccccagcgctgggctcagccgcggcgctcggctaccacgtgcagttcgggccgctgcggggcggggaggcgcagcgggtggaggtgcccgcgggccgcaactgcaccacgctgcagggcctggcgccgggcaccgcctacctggtgaccgtgaccgccgccttccgctcgggccgcgagagcgcgctgtccgccaaggcctgcacgcccgacggcccgcgcccgcgcccacgccccgtgccccgcgccccgaccccggggaccgccagccgtgagccgtaa

SEQ ID NO: 789 - DNA, 1959 bp, Homo Sapiens
atgcaccccgggggcgggccgagtcgggctgagcggctggagctgggccttggccgcgagaggccggcgaaagctatcttcctgcaccggcggccgggtgagggcggtgggagggagcggtgcctgcgctgtggccatgtctgtgtacgcagggggccggggccccgcgaagctgtgccctcaggccggccccggccggacacccttacccctccatgggtccggcagagggcagtgaccggcaccttctgtgcgtcctggactcctctgagaaacaggagagctcaaaggatggctactgacatgcagaggaagagaagcagcgaatgccttgatggcacattgactccttctgatggacagagtatggagagagctgagagccccacaccaggaatggcccagggaatggagccaggtgcgggccaggagggtgccatgttcgtccatgcccgttcctacgaggacctgactgagtcagaggatggggcagcttctggggacagccacaaggagggtaccaggggtcccccgccgctgcctacagacatgcgccagatcagccaggactttagcgagctaagcacccagctgacgggtgtggcccgggacctgcaggaggagatgctgccaggaagctctgaggattggctggaacccccaggggcagttgggcgaccagccacagagccccccagggagggcacaaccgagggggatgaggaggatgccacggaggcatggcgcctgcaccagaagcatgtctttgtgctgagtgaggcagggaagcctgtgtactcccgctatgggtctgaggaggcactttccagcactatgggtgttatggtggccctggtgtccttcctggaggcagacaagaacgccatccgctccatccatgcagatggctacaaggtagtattcgtgcgccggagcccgctggtgctagtggcggtggctcgtacgcggcagtcggcacaagagctggcgcaggagctgctctacatctactaccagatcctaagccttcttaccggtgcgcagctgagccacatcttccagcagaagcagaactatgatttgcggcgcctactctcgggctcagagcgcatcaccgacaacctgctgcagctcatggcacgagaccccagcttcctgatgggggcggcacggtgcctgcccctggcggcggccgtgcgcgacactgtgagcgccagcctgcagcaggcgcgtgcgcgcagcctggtcttctccatcctgctggcccgcaaccagctcgtggcactcgtgcgccgaaaggaccaatttctgcaccccatcgacctgcacctgctcttcaacctcattagttcctcctcgtcctttcgcgagggcgaggcctggacgcccgtgtgcctgcccaaattcaacgcagccggcttcttccacgcacacatctcttacctagagcctgacactgacctctgcctgctgcttgtctccactgaccgtgaggacttctttgcagtctctgactgccgccgccgcttccaggagcgccttcgcaagcgcggagcccacctggccctgcgagaggcactgcgcacaccctactacagcgttgcccaagtgggcatccctgacctgcgtcacttcctctataagtcaaagagctcgggactcttcaccagccctgagattgaggccccatacaccagtgaagaggagcaggagcggctgctgggcctctaccagtacttgcacagtcgtgcccacaatgcctctcgcccactcaagaccatttactacacgggccccaacgagaacctcctggcctgggtgacaggcgcctttgagctctacatgtgttacagccccctggggaccaaggcgtcagccgtcagtgccatccataagctgatgcgctggatccgcaaagaggaagaccgcctcttcattctcacgcccctcacctattga

SEQ ID NO: 790 - DNA, 1662 bp, Homo Sapiens
atgaagtggtgctggggcccagtgctgctcatcgcgggtgccacagtcctcatggagggtcttcaagccgctcagcgtgcctgtggacagcgtggccccggcccccccaagcctcaggagggcaacacagtccctggcgagtggccctggcaggccagtgtgaggaggcaaggagcccacatctgcagcggctccctggtggcagacacctgggtcctcactgctgcccactgctttgaaaaggcagcagcaacagaactgaattcctggtcagtggtcctgggttctctgcagcgtgagggactcagccctggggccgaagaggtgggggtggctgccctgcagttgcccagggcctataaccactacagccagggctcagacctggccctgctgcagctcgcccaccccacgacccacacacccctctgcctgccccagcccgcccatcgcttcccctttggagcctcctgctgggccactggctgggatcaggacaccagtgatgctcctgggaccctacgcaatctgcgcctgcgtctcatcagtcgccccacatgtaactgtatctacaaccagctgcaccagcgacacctgtccaacccggcccggcctgggatgctatgtgggggcccccagcctggggtgcagggcccctgtcagggagattccgggggccctgtgctgtgcctcgagcctgacggacactgggttcaggctggcatcatcagctttgcatcaagctgtgcccaggaggacgctcctgtgctgctgaccaacacagctgctcacagttcctggctgcaggctcgagttcagggggcagctttcctggcccagagcccagagaccccggagatgagtgatgaggacagctgtgtagcctgtggatccttgaggacagcaggtccccaggcaggagcaccctccccatggccctgggaggccaggctgatgcaccagggacagctggcctgtggcggagccctggtgtcagaggaggcggtgctaactgctgcccactgcttcattgggcgccaggccccagaggaatggagcgtagggctggggaccagaccggaggagtggggcctgaagcagctcatcctgcatggagcctacacccaccctgaggggggctacgacatggccctcctgctgctggcccagcctgtgacactgggagccagcctgcggcccctctgcctgccctatcctgaccaccacctgcctgatggggagcgtggctgggttctgggacgggcccgcccaggagcaggcatcagctccctccagacagtgcccgtgaccctcctggggcctagggcctgcagccggctgcatgcagctcctgggggtgatggcagccctattctgccggggatggtgtgtaccagtgctgtgggtgagctgcccagctgtgagggcctgtctggggcaccactggtgcatgaggtgaggggcacatggttcctggccgggctgcacagcttcggagatgcttgccaaggccccgccaggccggcggtcttcaccgcgctccctgcctatgaggactgggtcagcagtttggactggcaggtctacttcgccgaggaaccagagcccgaggctgagcctggaagctgcctggccaacataagccaaccaaccagctgctga

SEQ ID NO: 791 - DNA, 1917 bp, Homo Sapiens
atgtcagacaaaagtgaattaaaggctgagttggaacgtaagaagcagcgactggcccaaatcagagaggaaaagaagagaaaagaagaagaaaggaaaaaaaaagaaacagaccagaagaaggaagctgttgctcctgtgcaagaagaatcagatcttgaaaaaaaaaggagagaagctgaagcattgcttcaaagcatggggctaactccagaatcccccattgttttttctgaatactgggtccctcctcctatgtctccatcctccaaatctgtgagcactccaagtgaagctggaagccaagactctggagatggcgccgtgggatctaggacgctgcattgggatacagatccatcagttcttcagcttcactcagattccgatttgggacgaggacctattaaacttggaatggctaaaatcacgcaagtcgactttcctcctcgagaaattgtcacgtatacaaaggaaactcagactccagttatggctcaacccaaagaagatgaagaggaagatgatgatgtagtggctcctaaaccacctattgaacctgaagaagagaaaactttaaagaaagatgaggaaaatgatagtaaagctccccctcatgagctgactgaagaagaaaagcaacaaatcctgcactctgaggaatttttaagtttctttgaccattctacaagaattgtagaaagagctctttctgagcagattaacatcttctttgactatagtgggagagatttggaagacaaagaaggagagattcaagcaggtgctaaactgtcattaaatcgacaattttttgacgaacgttggtcaaagcatcgggtggttagttgtttggattggtcatctcagtatccggagttactcgtggcttcctataacaacaatgaagatgcccctcatgagcctgatggtgtggcccttgtatggaatatgaaatacaaaaaaactaccccagagtatgtgtttcactgccagtcagctgtgatgtctgccacatttgcaaaatttcatccaaatcttgttgttggtggtacatattcaggccaaattgtgctttgggataaccgtagcaataaaagaactccagtgcaaagaactccactgtcagcagctgcacacacacaccctgtatattgtgtaaatgttgttggaacacaaaatgctcacaatctgattagcatctctactgatggaaaaatttgttcatggagtctggacatgctttcccatccacaggatagcatggagttggttcataaacagtcaaaagcagtagctgtgacatctatgtccttccctgttggagatgtcaacaactttgttgttgggagtgaagaaggttctgtgtacacagcatgccgccatggcagcaaagctggaatcagtgagatgtttgaggggcatcaaggaccaatcactggcatccattgtcatgcagctgttggagcagtagacttctcacatctttttgtcacttcatcgtttgactggacagtaaagctttggacaactaagaataacaagcctttgtattcatttgaagataatgcagactatgtttatgatgttatgtggtcacctacccacccagccctgtttgcctgtgtggatggcatggggagattggatttatggaatctcaataatgacacagaggtaccaactgccagcatttctgtggagggtaatcctgctcttaatcgtgtgagatggacccattctggcagagagattgctgtgggtgattctgaaggacagattgttatatacgatgtgggagagcagattgctgttccccgcaatgatgaatgggcacggtttggccgaacacttgcagaaattaatgcaaaccgagctgatgcagaggaggaagcagctacccgaatacctgcttag

SEQ ID NO: 792 - DNA, 2514 bp, Homo Sapiens
atggcggaaccttcccaggccccgaccccggccccggctgcgcagccccggccccttcagtccccagcccctgccccaactccgactcctgcacccagcccggcttcagccccgattccgactcccaccccggcaccagcccctgccccagctgcagccccagccggcagcacagggactggggggcccggggtaggaagtgggggggccgggagcgggggggatccggctcgacctggcctgagccagcagcagcgcgccagtcagaggaaggcgcaagtccgggggctgccgcgcgccaagaagcttgagaagctaggggtcttctcggcttgcaaggccaatgaaacctgtaagtgtaatggctggaaaaaccccaagccccccactgcaccccgcatggatctgcagcagccagctgccaacctgagtgagctgtgccgcagttgtgagcaccccttggctgaccacgtatcccacttggagaatgtgtcagaggatgagataaaccgactgctggggatggtggtggatgtggagaatctcttcatgtctgttcacaaggaagaggacacagacaccaagcaggtctatttctacctcttcaagctactgcggaaatgcatcctgcagatgacccggcctgtggtggaggggtccctgggcagccctccatttgagaaacctaatattgagcagggtgtgctgaactttgtgcagtacaagtttagtcacctggctccccgggagcggcagacgatgttcgagctctcaaagatgttcttgctctgccttaactactggaagcttgagacacctgcccagtttcggcagaggtctcaggctgaggacgtggctacctacaaggtcaattacaccagatggctctgttactgccacgtgccccagagctgtgatagcctcccccgctacgaaaccactcatgtctttgggcgaagccttctccggtccattttcaccgttacccgccggcagctgctggaaaagttccgagtggagaaggacaaattggtgcccgagaagaggaccctcatcctcactcacttccccaaattcctgtccatgctggaggaggagatctatggggcaaactctccaatctgggagtcaggcttcaccatgccaccctcagaggggacacagctggttccccggccagcttcagtcagtgcagcggttgttcccagcacccccatcttcagccccagcatgggtgggggcagcaacagctccctgagtctggattctgcaggggccgagcctatgccaggcgagaagaggacgctcccagagaacctgaccctggaggatgccaagcggctccgtgtgatgggtgacatccccatggagctggtcaatgaggtcatgctgaccatcactgaccctgctgccatgctggggcctgagacgagcctgctttcggccaatgcggcccgggatgagacagcccgcctggaggagcgccgcggcatcatcgagttccatgtcatcggcaactcactgacgcccaaggccaaccggcgggtgttgctgtggctcgtggggctgcagaatgtcttttcccaccagctgccgcgcatgcctaaggagtatatcgcccgcctcgtctttgacccgaagcacaagactctggccttgatcaaggatgggcgggtcatcggtggcatctgcttccgcatgtttcccacccagggcttcacggagattgtcttctgtgctgtcacctcgaatgagcaggtcaagggttatgggacccacctgatgaaccacctgaaggagtatcacatcaagcacaacattctctacttcctcacctacgccgacgagtacgccatcggctacttcaaaaagcagggtttctccaaggacatcaaggtgcccaagagccgctacctgggctacatcaaggactacgagggagcgacgctgatggagtgtgagctgaatccccgcatcccctacacggagctgtcccacatcatcaagaagcagaaagagatcatcaagaagctgattgagcgcaaacaggcccagatccgcaaggtctacccggggctcagctgcttcaaggagggcgtgaggcagatccctgtggagagcgttcctggcattcgagagacaggctggaagccattggggaaggagaaggggaaggagctgaaggaccccgaccagctctacacaaccctcaaaaacctgctggcccaaatcaagtctcaccccagtgcctggcccttcatggagcctgtgaagaagtcggaggcccctgactactacgaggtcatccgcttccccattgacctgaagaccatgactgagcggctgcgaagccgctactacgtgacccggaagctctttgtggccgacctgcagcgggtcatcgccaactgtcgcgagtacaaccccccggacagcgagtactgccgctgtgccagcgccctggagaagttcttctacttcaagctcaaggagggaggcctcattgacaagtag

SEQ ID NO: 793 - DNA, 2850 bp, Homo Sapiens
atgtctttggctttcaagatcttctttccacaaaccctccgtgcactcagccgaaaagaactgtgcctattccgaaaacatcactggcgtgatgtaagacaattcagccagtggtcagaaacagatctgcttcatggacatcccctcttcctgagaagaaagcctgttctatcattccagggaagccatctaagatcacgtgccacctaccttgttttcttgccagggttgcatgtgggactctgcagtggcccctgtgagatggctgagcaacggttctgtgtggactatgccaagcgtggcacagctggctgcaaaaaatgcaaggaaaagattgtgaagggcgtatgccgaattggcaaagtggtgcccaatcccttctcagagtctgggggtgatatgaaagagtggtaccacattaaatgcatgtttgagaaactagagcgggcccgggccaccacaaaaaaaatcgaggacctcacagagctggaaggctgggaagagctggaagataatgagaaggaacagataacccagcacattgcagatctgtcttctaaggcagcaggtacaccaaagaagaaagctgttgtccaggctaagttgacaaccactggccaggtgacttctccagtgaaaggcgcctcatttgtcaccagtaccaatccccggaaattttctggcttttcagccaagcccaacaactctggggaagccccctcgagccccacccctaagagaagtctgtcttcaagcaaatgtgaccccaggcataaggactgtctgctacgggagtttcgaaagttatgcgccatggtggccgataatcctagctacaacacgaagacccagatcatccaggacttccttcggaaaggctcagcaggagatggtttccacggtgatgtgtacctaacagtgaagctgctgctgccaggagtcattaagactgtttacaacttgaacgataagcagattgtgaagcttttcagtcgcatttttaactgcaacccagatgatatggcacgggacctagagcagggtgacgtgtcagagacaatcagagtcttctttgagcagagcaagtctttccccccagctgccaagagcctccttaccatccaggaagtggatgagttccttctgcggctgtccaagctcaccaaggaggatgagcagcaacaggccctacaggacattgcctccaggtgtacagccaatgaccttaaatgcatcatcaggttgatcaaacatgatctgaagatgaactcaggtgcaaaacatgtgttagacgcccttgaccccaatgcctatgaagccttcaaagcctcgcgcaacctgcaggatgtggtggagcgggtccttcacaacgcgcaggaggtggagaaggagccgggccagagacgagctctgagcgtccaggcctcgctgatgacacctgtgcagcccatgttggcggaggcctgcaagtccgttgagtatgcaatgaagaaatgtcccaatggcatgttctctgagatcaagtacgatggagagcgagtccaggtgcataagaatggagaccacttcagctacttcagccgcagtctcaagcccgtccttcctcacaaggtggcccactttaaggactacattccccaggcttttcctgggggccacagcatgatcttggattctgaagtgcttctgattgacaacaagacaggcaaaccactgccctttgggactctgggagtacacaagaaagcagccttccaggatgctaatgtctgcctgtttgtttttgattgtatctactttaatgatgtcagcttgatggacagacctctgtgtgagcggcggaagtttcttcatgacaacatggttgaaattccaaaccggatcatgttctcagaaatgaagcgagtcacaaaagctttggacttggctgacatgataacccgggtgatccaggagggattggaggggctggtgctgaaggatgtgaagggtacatatgagcctgggaagcggcactggctgaaagtgaagaaagactatttgaacgagggggccatggccgacacagctgacctggtggtccttggagccttctatgggcaagggagcaaaggcggcatgatgtcaatcttcctcatgggctgctacgaccctggcagccagaagtggtgcacagtcaccaagtgtgcaggaggccatgatgatgccacgcttgcccgcctgcagaatgaactagacatggtgaagatcagcaaggaccccagcaaaatacccagctggttgaaggtcaacaagatctactatcctgacttcatcgtcccagacccaaagaaagctgccgtgtgggagatcacaggggctgaattctccaaatcggaggctcatacagctgacgggatctccatccgattccctcgctgcacccgaatccgagatgataaggactggaaatctgccactaaccttccccaactcaaggaactgtaccagttgtccaaggagaaggcagacttcactgtagtggctggagatgaggggagctccactacagggggtagcagtgaagagaataagggtccctcagggtctgctgtgtcccgcaaggcccccagcaagccctcagccagtaccaagaaagcagaagggaagctgagtaactccaacagcaaagatggcaacatgcagactgcaaagccttccgctatgaaggtgggggagaagctggccacaaagtcttctccagtgaaagtaggggagaagcggaaagctgctgatgagacgctgtgccaaacaaagaggcggccagccagtgagcagagaggaagaactgtgccagcaggcaggagatag

SEQ ID NO: 794 - DNA, 459 bp, Homo Sapiens
atggccaactgtgagcgtaccttcattgcgatcaaaccagatggggtccagcggggtcttgtgggagagattatcaagcgttttgagcagaaaggattccgccttgttggtctgaaattcatgcaagcttccgaagatcttctcaaggaacactacgttgacctgaaggaccgtccattctttgccggcctggtgaaatacatgcactcagggccggtagttgccatggtctgggaggggctgaatgtggtgaagacgggccgagtcatgctcggggagaccaaccctgcagactccaagcctgggaccatccgtggagacttctgcatacaagttggcaggaacattatacatggcagtgattctgtggagagtgcagagaaggagatcggcttgtggtttcaccctgaggaactggtagattacacgagctgtgctcagaactggatctatgaatga

SEQ ID NO: 795 - DNA, 519 bp, Homo Sapiens
atgttctaccatatctccctagagcacgaaatcctgctgcacccgcgctacttcggccccaacttgctcaacacggtgaagcagaagctcttcaccgaggtggaggggacctgcacagggaagtatggctttgtaattgctgtcaccaccattgacaatattggtgctggtgtgatccagccaggccgaggctttgtcctttatccagttaagtacaaggccattgttttccggccatttaaaggggaggtcgtggatgctgttgtcactcaggtcaacaaggttggactcttcacagaaattgggcccatgtcttgcttcatctctcgacattccatcccttcagagatggagtttgatcctaactccaacccaccatgttacaagacaatggatgaggatattgtgattcagcaggacgatgagatccgcttaaagattgtggggacccgtgtggacaagaatgacatttttgctattggctccctgatggacgattacttggggcttgtaagctga

SEQ ID NO: 796 - DNA, 3075 bp, Homo Sapiens
atggcccagggtgccatgcgcttctgctcggaaggcgactgtgccatctccccaccacgatgcccacgccgctggctccccgaaggcccggtgccccagagccccccagccagcatgtatggcagcacaggctccttgctacggcgagtggcaggtccaggtcctcgaggccgggaactgggacgtgtgacagcaccctgtacacctctgcgtggccccccctcaccccgtgttgctccctcaccctgggcaccctcttcacccactgggcagcccccacccggggcccagagctctgtggtcatcttccgctttgtggagaaggccagtgtgaggccactgaatgggctacctgctccagggggcttgagtcggagctgggatctgggtggggtttctcctcccaggcccaccccagcccttgggcctggctccaaccggaagttacggctggaagcatccacatcagacccactccccgccagaggaggctcggccctacctggcagccggaaccttgtacatgggccgccagccccaccccaggttggagcagatggcctttactcctctctccccaatgggctggggggcccccctgagcgcctggccacactcttcggaggacctgctgacactggattcctgaaccagggggatacctggtcctccccccgggaagtctcctctcatgcccagagaatcgctagagccaaatgggaattcttctatggctccttggacccccccagctcaggtgctaagcccccagagcaggcccccccatctccacctggggtgggctcaaggcagggctctggggtggctgtggggcgagcagccaagtactccgagacagacctggacacggtgcccctgaggtgctaccgcgagactgacatcgatgaggtgctggctgagcgggaggaggccgactcggccatcgaaagtcagcccagctctgagggcccaccaggcactgcctacccacctgccccacggcccggcccactccctggccctcatcccagcctcggcagtggcaatgaggatgaggacgacgatgaggcaggtggggaagaagatgtggacgacgaggtgtttgaggcctctgaaggggcccggccagggagccggatgcctctcaagtcacctgtgccctttctacctgggacgagcccctcggctgatgggcctgactctttcagttgtgtgttcgaagccatcctggagtcacaccgggccaaaggcacctcctataccagcctcgcctcgctggaggccttggcctcacctggcccaacccagagccccttcttcacctttgagctgcctccccaaccccctgcaccccggcccgacccaccagctcccgccccacttgcccctcttgaaccggattctggtaccagctctgctgctgatggtccttggacacagagaggggaggaggaggaggcagaggccagagccaagctggccccagggagggagccccctagtccctgccactcagaggacagccttgggctgggggcagcaccccttggcagcgaaccacccctgagccagctggtgtccgactcagactcagagctggacagcacagagcggctggccctgggaagcacagacaccttgtccaatgggcagaaagcggacctggaggctgcgcagcgcctggccaagaggctgtaccgactagatggcttcaggaaggccgatgtggcccggcacctgggcaagaacaatgacttcagcaaactggtggctggggagtacctcaagttctttgtcttcacgggcatgactctggaccaagctctcagggtgtttctgaaggagctggccttaatgggtgagacccaggaacgagagcgcgtgctggcccacttctcccagcgatacttccagtgcaatcctgaagccctgtcctcagaggacggcgcccacacgctgacctgtgcgctcatgctgctcaacacggatctccacggccataacatcgggaagcgcatgacctgcggggacttcatcgggaacctggagggcctcaatgatggcggcgacttccctagggagctgctcaaggccttgtacagctccatcaagaatgagaagctgcagtgggccatagacgaggaggagctgagacgctctctgtctgagttggccgaccccaaccccaaggtcatcaagcggatcagcgggggcagtggcagtggctccagccctttcctggacctgactcccgagcctggggctgccgtctacaagcacggggccctggtgcgaaaggtgcacgcagaccctgactgcaggaagacacctcggggcaagcggggctggaagagcttccacgggatcctcaagggcatgatcctctacctgcagaaggaggagtacaagcctgggaaggccctttcagagacggagctcaagaatgccatcagcatccaccatgccctggccactcgtgccagtgactacagcaagaggccccacgtcttctacctgcgcacagctgactggcgggtcttcctcttccaggccccgagcctggagcagatgcagtcctggatcactcgcatcaatgtagtagccgctatgttctctgcgccccccttcccagctgctgttagctcccaaaagaagttcagccgccctctcctgcccagcgctgccacccgcctctcccaggaggagcaggtgcggacccacgaggccaagctgaaggccatggcaagtgagctgcgggagcaccgggccgcccagctgggcaagaagggccggggcaaggaggctgaagagcagcggcagaaggaggcctacctggagtttgagaaatcccgctacagcacctatgcagcgctgcttcgggtcaagctgaaggcaggcagtgaggagctggatgcagtggaggcagcactggcccaggccgggagcacagaggatggactccctccttctcactccagtccctccctgcagcccaaaccctccagccagccccgggctcagcgtcacagctcagagcctcggccaggggcaggcagtgggcggcggaagccctga

SEQ ID NO: 797 - DNA, 996 bp, Homo Sapiens
atgggcactccacagaaggatgttattatcaagtcagatgcaccggacactttgttattggagaaacatgcagattatatcgcatcctatggctcaaagaaagatgattatgaatactgtatgtctgagtatttgagaatgagtggcatctattggggtctgacagtaatggatctcatgggacaacttcatcgcatgaatagagaagagattctggcatttattaagtcttgccaacatgaatgtggtggaataagtgctagtatcggacatgatcctcatcttttatacactcttagtgctgtccagattcttacgctgtatgacagtattaatgttattgacgtaaataaagttgtggaatatgttaaaggtctacagaaagaagatggttcttttgctggagatatttggggagaaattgacacaagattctctttttgtgcggtggcaactttggctttgttggggaagcttgatgctattaatgtggaaaaggcaatcgaatttgttttatcctgtatgaactttgacggtggatttggttgcagaccaggttctgaatcccatgctgggcagatctattgttgcacaggatttctggctattacaagtcagttgcatcaagtaaattctgatttacttggctggtggctttgtgaacgacaattaccctcaggcgggctcaatggaaggccggagaagttaccagatgtatgctactcatggtgggtcctggcttccctaaagataattggaagacttcattggattgatagagagaaactgcgtaatttcattttagcatgtcaagatgaagaaacggggggatttgcagacaggccaggagatatggtggatccttttcataccttatttggaattgctggattgtcacttttgggagaagaacagattaaacctgttaatcctgtcttttgcatgcctgaagaagtgcttcagagagtgaatgttcagcctgagctagtgagctag

SEQ ID NO: 798 - DNA, 966 bp, Homo Sapiens
atgggtgaaccccagggatccatgcggattctagtgacagggggctctgggctggtaggcaaagccatccagaaggtggtagcagatggagctggacttcctggagaggactgggtgtttgtctcctctaaagacgccgatctcacggatacagcacagacccgcgccctgtttgagaaggtccaacccacacacgtcatccatcttgctgcaatggtggggggcctgttccggaatatcaaatacaatttggacttctggaggaaaaacgtgcacatgaacgacaacgtcctgcactcggcctttgaggtgggcgcccgcaaggtggtgtcctgcctgtccacctgtatcttccctgacaagacgacctacccgatagatgagaccatgatccacaatgggcctccccacaacagcaattttgggtactcgtatgccaagaggatgatcgacgtgcagaacagggcctacttccagcagtacggctgcaccttcaccgctgtcatccccaccaacgtcttcgggccccacgacaacttcaacatcgaggatggccacgtgctgcctggcctcatccacaaggtgcacctggccaagagcagcggctcggccctgacggtgtggggtacagggaatccgcggaggcagttcatatactcgctggacctggcccagctctttatctgggtcctgcgggagtacaatgaagtggagcccatcatcctctccgtgggcgaggaagatgaggtctccatcaaggaggcagccgaggcggtggtggaggccatggacttccatggggaagtcacctttgatacaaccaagtcggatgggcagtttaagaagacagccagtaacagcaagctgaggacctacctgcccgacttccggttcacacccttcaagcaggcggtgaaggagacctgtgcttggttcactgacaactacgagcaggcccggaagtga

SEQ ID NO: 799 - DNA, 444 bp, Homo Sapiens
atggcttctcatcgtctgctcctcctctgccttgctggactggtatttgtgtctgaggctggccctacgggcaccggtgaatccaagtgtcctctgatggtcaaagttctagatgctgtccgaggcagtcctgccatcaatgtggccgtgcatgtgttcagaaaggctgctgatgacacctgggagccatttgcctctgggaaaaccagtgagtctggagagctgcatgggctcacaactgaggaggaatttgtagaagggatatacaaagtggaaatagacaccaaatcttactggaaggcacttggcatctccccattccatgagcatgcagaggtggtattcacagccaacgactccggcccccgccgctacaccattgccgccctgctgagcccctactcctattccaccacggctgtcgtcaccaatcccaaggaatga

SEQ ID NO: 800 - DNA, 855 bp, Homo Sapiens
atggctccgcggctgtgcagcatctctgtgacggcgcggcggctgctggggggcccggggcctcgcgctggggacgttgcgtctgcagctgcggcgcgtttctattccaaggacaatgaaggcagctggttccgctccctctttgttcacaaagtggatccccggaaggatgcccactccaccctgctgtccaagaaggaaaccagcaacctctataagatccagtttcacaatgtaaagcctgaatacctggatgcctacaacagcctcacggaggctgtgctgcccaagcttcacctggatgaggactacccatgctcactcgtgggcaactggaacacgtggtatggggagcaggaccaggcagtgcacctgtggcgattctcaggtggctacccagccctcatggactgcatgaacaagctcaaaaacaataaggagtacctggagttccgaagggagcggagccagatgctgctgtccaggagaaaccagctgctcctcgagttcagcttctggaatgagccacagcccagaatgggtcccaacatctatgagctgaggacatacaagctcaagccaggaaccatgatcgagtgggggaacaactgggctcgggccatcaagtaccggcaggagaaccaggaggcagtgggcggcttcttctcacagataggagagctctacgtggtgcaccatctctgggcctataaagacctgcagtctcgggaggagactcgaaacgctgcctggaggaagagaggctgggatgaaaatgtctactatacagtccccctggtgcgacacatggagtctaggatcatgatccccttgaagatctcgcctctgcagtga

SEQ ID NO: 801 - DNA, 2880 bp, Homo Sapiens
atggcggcgagcactggctacgtgcgactgtggggagcggcgcggtgctgggtgctgcggcggccgatgctggccgccgccggggggcgggttcccactgcagcaggagcgtggttgctccgaggccagcggacctgcgacgcctctcctccttgggcactgtggggccgaggcccggcaattgggggccaatggcgggggttttgggaagcgagcagccgcggcggaggcgcattctcggggggcgaggacgcctccgagggcggcgcggaggaaggagccggcggcgcggggggcagcgcgggcgccggggaaggcccggtcataacggcgctcacgcccatgacgatccccgatgtgtttccgcacctgccgctcatcgccatcacccgcaacccggtgttcccgcgctttatcaagattatcgaggttaaaaataagaagttggttgagctgctgagaaggaaagttcgtctcgcccagccttatgtcggcgtctttctaaagagagatgacagcaatgagtcggatgtggtcgagagcctggatgaaatctaccacacggggacgtttgcccagatccatgagatgcaggaccttggggacaagctgcgcatgatcgtcatgggacacagaagagtccatatcagcagacagctggaggtggagcccgaggagccggaggcggagaacaagcacaagccccgcaggaagtcaaagcggggcaagaaggaggcggaggacgagctgagcgccaggcacccggcggagctggcgatggagcccacccctgagctcccggctgaggtgctcatggtggaggtagagaacgttgtccacgaggacttccaggtcacggaggaggtgaaagccctgactgcagagatcgtgaagaccatccgggacatcattgccttgaaccctctctacagggagtcagtgctgcagatgatgcaggctggccagcgggtggtggacaaccccatctacctgagcgacatgggcgccgcgctcaccggggccgagtcccatgagctgcaggacgtcctggaagagaccaatattcctaagcggctgtacaaggccctctccctgctgaagaaggaatttgaactgagcaagctgcagcagcgcctggggcgggaggtggaggagaagatcaagcagacccaccgtaagtacctgctgcaggagcagctaaagatcatcaagaaggagctgggcctggagaaggacgacaaggatgccatcgaggagaagttccgggagcgcctgaaggagctcgtggtccccaagcacgtcatggatgttgtggacgaggagctgagcaagctgggcctgctggacaaccactcctcggagttcaatgtcacccgcaactacctagactggctcacgtccatcccttggggcaagtacagcaacgagaacctggacctggcgcgggcacaggcagtgctggaggaagaccactacggcatggaggacgtcaagaaacgcatcctggagttcattgccgttagccagctccgcggctccacccagggcaagatcctctgcttctatggcccccctggcgtgggtaagaccagcattgctcgctccatcgcccgcgccctgaaccgagagtacttccgcttcagcgtcgggggcatgactgacgtggctgagatcaagggccacaggcggacctacgtgggcgccatgcccgggaagatcatccagtgtttgaagaagaccaagacggagaaccccctgatcctcatcgacgaggtggacaagatcggccgaggctaccagggggacccgtcgtcggcactgctggagctgctggacccagagcagaatgccaacttcctggaccactacctggacgtgcccgtggacttgtccaaggtgctgttcatctgcacggccaacgtcacggacaccatccccgagccgctgcgagaccgtatggagatgatcaacgtgtcgggctacgtggcccaggagaagctggccattgcggagcgctacctggtgccccaggctcgcgccctgtgtggcttggatgagagcaaggccaagctgtcatcggacgtgctgacgctgctcatcaagcagtactgccgcgagagcggtgtccgcaacctgcagaagcaagtggagaaggtgttacggaaatcggcctacaagattgtcagcggcgaggccgagtccgtggaggtgacgcccgagaacctgcaggacttcgtggggaagcccgtgttcaccgtggagcgcatgtatgacgtgacaccgcccggcgtggtcatggggctggcctggaccgcaatgggaggctccacgctgtttgtggagacatccctgagacggccacaggacaaggatgccaagggtgacaaggatggcagcctggaggtgacaggccagctgggggaggtgatgaaggagagcgcccgcatagcctacaccttcgccagagccttcctcatgcagcacgcccccgccaatgactacctggtgacctcacacatccacctgcatgtgcccgagggcgccacccccaaggacggcccaagcgcaggctgcaccatcgtcacggccctgctgtccctggccatgggcaggcctgtccggcagaatctggccatgactggcgaagtctccctcacgggcaagatcctgcctgttggtggcatcaaggagaagaccattgcggccaagcgcgcaggggtgacgtgcatcgtcctgccagccgagaacaagaaggacttctacgacctggcagccttcatcaccgagggcctggaggtgcacttcgtggaacactaccgggagatcttcgacatcgccttcccggacgagcaggcagaggcgctggccgtggaacggtga

SEQ ID NO: 802 - DNA, 726 bp, Homo Sapiens
atggtggattactatgaagttctaggcgtgcagagacatgcctcacccgaggatattaaaaaggcatatcggaaactggcactgaagtggcatccagataaaaatcctgagaataaagaagaagcagagagaaaattcaagcaagtagcggaggcatatgaagtgctgtcggatgctaagaaacgggacatctatgacaaatatggcaaagaaggattaaatggtggaggaggaggtggaagtcattttgacagtccatttgaatttggcttcacattccgtaacccagatgatgtcttcagggaattttttggtggaagggacccattttcatttgacttctttgaagacccttttgaggacttctttgggaatcgaaggggtccccgaggaagcagaagccgagggacggggtcgtttttctctgcgttcagtggatttccgtcttttggaagtggattttcttcttttgatacaggatttacttcatttgggtcactaggtcacgggggcctcacttcattctcttccacgtcatttggtggtagtggcatgggcaacttcaaatcgatatcaacttcaactaaaatggttaatggcagaaaaatcactacaaagagaattgtcgagaacggtcaagaaagagtagaagttgaagaagatggccagttaaagtccttaacaataaatggtaaggagcagctgctgcgcttggataacaagtaa

SEQ ID NO: 803 - DNA, 2214 bp, Homo Sapiens
atggcggacacccagtacatcctgcccaatgacatcggcgtgtctagcctggactgccgtgaggccttccgcctgctgtcacccacagagcgcctctatgcctaccacctgtcccgtgccgcctggtacggaggcctggctgtgctgcttcagacctcccctgaggccccctacatctatgctctgctcagccgcctcttccgcgcccaggaccccgaccagctgcgccaacatgccctggctgaaggccttaccgaggaggagtatcaggcgttcctggtctatgccgcgggtgtttactccaacatgggcaactacaagtcctttggtgacaccaagtttgttcccaacttgcccaaggaaaagctggaacgggtgatcctagggagtgaggctgctcagcagcacccagaagaagtcaggggcctctggcagacctgcggggagcttatgttctctctggagccaaggcttcgacacctcggactggggaaggagggaatcaccacctatttctctgggaattgtaccatggaagatgccaaattggcccaggactttctggactcacagaacctcagtgcctacaacacccggctcttcaaagaggtcgatggagaagggaagccctactacgaggtgcggctggcttctgtgcttggctcagagccttccctggactctgaggtgacttccaagctgaagagctatgaattccggggaagccctttccaggtgacccggggggactacgcgcccatcctccagaaggtggtggagcagctggagaaagccaaggcctatgcagccaacagccaccaggggcagatgctggcccagtatatagagagcttcacccagggctccatcgaggcccacaagaggggctcccgcttctggatccaggacaaaggccccatcgtggagagttacatcgggttcatcgagagctaccgcgacccctttggttcccgaggagaatttgaaggtttcgtagctgtggtgaacaaggccatgagtgccaagtttgagcggctggtggcgagcgcagagcagctgctgaaggagctgccctggcccccaacctttgagaaggacaagttcctcacccctgacttcacctccctggatgttctcaccttcgctggctccggcatccctgccggcatcaacatccccaactacgatgatctgaggcagacggaaggctttaagaacgtgtcgctggggaatgtgctggctgtggcctacgccacgcagcgggagaagcttacctttctggaggaggatgacaaggacctgtacatcctctggaaggggccctccttcgatgtgcaggtgggcctgcacgagctgctgggccatggcagtggcaagctcttcgtacaggacgaaaaaggagcattcaactttgaccaggaaacagtgatcaacccagagacgggcgagcagattcagagctggtatcggagcggggagacctgggatagcaagttcagcaccatcgcctccagctacgaagagtgccgggctgagagcgtgggtctctacctctgtctccacccgcaagtgctggagatctttggctttgagggggctgatgcggaggacgtgatctacgtgaactggctcaacatggttcgggccgggctgctcgctctggagttctacacacctgaggccttcaactggcgacaggcccatatgcaggcccggtttgtgatcctgagagtcttgctggaggctggcgagggactcgttaccatcactcccaccacaggctccgatgggcgcccagatgcccgggtccgcctcgaccgcagcaagatccggtctgtgggcaagcctgctctagagcgcttcctgcggagacttcaggtgctgaagtccacaggggatgtggccggagggcgggccctgtacgaggggtatgcaacagtcactgatgcgccccccgagtgcttcctcaccctcagggacacggtgctgctgcgtaaggaatctcggaagctcattgttcagcccaacactcgccttgaaggctcagacgtgcagcttctggaatacgaggcgtcagctgctggcctcatccgatccttctctgagcgtttcccagaggatggacccgagttggaggagatcctcacacagctggccacagccgatgcccgattctggaagggccccagtgaggccccatctggccaagcttga

SEQ ID NO: 804 - DNA, 405 bp, Homo Sapiens
atggagtttgtgatgaagcaggctctaggaggggccaccaaggacatggggaagatgctggggggtgacgaggagaaggacccagacgccgccaagaaggaggaggagcggcaggaggcgctgcgccaggcggaggaggagcgcaaggccaagtacgccaagatggaggcggagcgcgaggccgtgcgccagggcatccgagacaagtacggcatcaagaagaaggaggagcgcgaggccgaggcccaggccgccatggaggccaactccgaggggagcttgacgcggcccaagaaggccatcccgccgggctgcggggacgaggtggaggaggaggacgagagcatcctggacaccgtcatcaagtacctgcccgggccgctgcaggacatgctcaagaagtag

SEQ ID NO: 805 - DNA, 813 bp, Homo Sapiens
atgggcgaggcggaggcgccttctttcgaaatgacctggagcagcacgacgagcagtggctactgcagccaagaggactcggactcggagctcgagcagtacttcaccgcgcgaacctcgctagctcgcaggccgcgccgggaccaggacgagcctgtggagtgggagacacctgacctttctcaagctgagattgagcagaagatcaaggagtacaatgcccagatcaacagcaacctcttcatgagcttgaacaaggacggttcttacacaggcttcatcaaggttcagctgaagctggtgcgccctgtctctgtgccctccagcaagaagccaccctccttgcaggatgcccggcggggcccaggacggggcacaagtgtcaggcgccgcacttccttttacctgcccaaggatgctgtcaagcacctgcatgtgctgtcacgcacaagggcacgtgaagtcattgaggccctgctgcgaaagttcttggtggtggatgacccccgcaagtttgcactctttgagcgcgctgagcgtcacggccaagtgtacttgcggaagctgttggatgatgagcagcccctgcggctgcggctcctggcagggcccagtgacaaggccctgagctttgtcctgaaggaaaatgactctggggaggtgaactgggacgccttcagcatgcctgaactacataacttcctacgtatcctgcagcgggaggaggaggagcacctccgccagatcctgcagaagtactcctattgccgccagaagatccaagaggccctgcacgcctgcccccttgggtga

SEQ ID NO: 806 - DNA, 1515 bp, Homo Sapiens
atgggcgctggcggcccccggcggggcgagggccccccagacggcggctggggctgggtggtgctgggcgcctgctttgtggtcaccggcttcgcctacggcttccccaaagccgtgagcgtcttcttccgcgcgctcatgcgcgacttcgacgccggctacagcgacacggcctgggtgtcctccatcatgctagccatgctctacggcacgggccccgtgtccagcatcctcgtgacccgctttggctgtcgcccggtgatgctggcgggtgggctgctggcttccgcgggcatgatcctagcttcctttgccacgcgcctcctggagctctacctgaccgctggggtgctcacaggcctgggcctggccctcaacttccagccgtcgctcatcatgctggggctgtacttcgagcggcggcggcctctggccaacgggctggcggcggcgggcagccccgtgttcctgtccgcgctgtcgccgctcggccagcagctgctggagcgcttcggctggcgcggcggcttcctgctgctcggcgggctcctgctgcactgctgcgcctgcggggctgtcatgaggccgccgcccgggccgggcccgcgaccgcgcagggacagcgccggcgaccgcgccggggacgctccgggcgaggcggaggctgacggtgcggggctgcagctgcgcgaggcatcccccagggtccggccccgccggcgcctgctggacttggcagtgtgcaccgaccgcgccttcgccgtgtacgccgtcaccaagttcctgatggcgctcgggctcttcgtccccgccatcctgctggtgaactacgccaaggacgcgggcgtgcccgacaccgacgccgccttcctgctgtccatcgtgggcttcgtggacatcgtggcgcgcccggcgtgcggcgccctggcgggcctggcgcgtctgcggccgcacgtcccgtatctgttcagcctggccctgctggccaatgggctcacagacctgagcagcgcacgcgcgcgctcctacggcgccctcgtcgccttctgcgtcgccttcggcctctcctacggcatggtgggcgcgctgcagttcgaggtgctcatggcggctgtgggcgcgccccgcttccccagtgcgctgggcctggtgttgctcgtggaggccgcggctgtgctcatcggaccgccctctgccggccgcctggtggatgtgttgaagaactatgagatcatcttctacctggccggctctgaggtggccctggctggggtcttcatggctgtcgccaccaactgctgcctgcgttgtgctaaagctgccccgtcaggcccaggcactgagggcggagccagtgacactgaggacgctgaggctgaaggggactctgagcccctgcctgttgttgcagaggaacccggcaacctggaggccctggaggtgctcagcgcccggggcgagcccacagaaccagaaatagaggcgaggccgaggctggctgccgagtctgtataa

SEQ ID NO: 807 - DNA, 786 bp, Homo Sapiens
atggcgctcaacaagaatcactcggagggcggcggagtgatcgtcaataacaccgagagcatcctaatgtcctatgatcacgtggaactcacattcaatgacatgaagaacgtgccagaagccttcaaagggaccaagaaaggcactgtctaccttaccccttaccgggtcatctttctgtccaagggcaaggatgccatgcagtccttcatgatgccattttatctcatgaaagactgtgagatcaagcagcccgtatttggtgcaaactacatcaagggaacagtgaaggcggaagcgggaggtggctgggaaggctctgcttcctacaagttgactttcacggcagggggcgccattgagttcggacagcggatgctccaggtggcatctcaagcctccagaggtgaagtccccagtggagcctatggctactcttacatgcccagcggggcctatgtctatcccccgccagtcgccaatggaatgtacccctgccctcctggctacccctatccaccgcccccacctgagttctatccaggaccccccatgatggacggggccatgggatacgtgcagcccccaccaccgccctaccctgggcccatggaacctccggtcagcggccccgatgtcccctccactcctgcagccgaagccaaggccgcagaagcagccgccagcgcctattacaacccaggcaatcctcacaacgtctacatgcccacgagccagccgccgccacctccctactacccaccggaagataagaagacccagtag

SEQ ID NO: 808 - DNA, 1644 bp, Homo Sapiens
atggaggactctgaagcactgggcttcgaacacatgggcctcgatccccggctccttcaggctgtcaccgatctgggctggtcgcgacctacgctgatccaggagaaggccatcccactggccctagaagggaaggacctcctggctcgggcccgcacgggctccgggaagacggccgcttatgctattccgatgctgcagctgttgctccataggaaggcgacaggtccggtggtagaacaggcagtgagaggccttgttcttgttcctaccaaggagctggcacggcaagcacagtccatgattcagcagctggctacctactgtgctcgggatgtccgagtggccaatgtctcagctgctgaagactcagtctctcagagagctgtgctgatggagaagccagatgtggtagtagggaccccatctcgcatattaagccacttgcagcaagacagcctgaaacttcgtgactccctggagcttttggtggtggacgaagctgaccttcttttttcctttggctttgaagaagagctcaagagtctcctctgtcacttgccccggatttaccaggcttttctcatgtcagctacttttaacgaggacgtacaagcactcaaggagctgatattacataacccggttacccttaagttacaggagtcccagctgcctgggccagaccagttacagcagtttcaggtggtctgtgagactgaggaagacaaattcctcctgctgtatgccctgctcaagctgtcattgattcggggcaagtctctgctctttgtcaacactctagaacggagttaccggctacgcctgttcttggaacagttcagcatccccacctgtgtgctcaatggagagcttccactgcgctccaggtgccacatcatctcacagttcaaccaaggcttctacgactgtgtcatagcaactgatgctgaagtcctgggggccccagtcaagggcaagcgtcggggccgagggcccaaaggggacaaggcctctgatccggaagcaggtgtggcccggggcatagacttccaccatgtgtctgctgtgctcaactttgatcttcccccaacccctgaggcctacatccatcgagctggcaggacagcacgcgctaacaacccaggcatagtcttaacctttgtgcttcccacggagcagttccacttaggcaagattgaggagcttctcagtggagagaacaggggccccattctgctcccctaccagttccggatggaggagatcgagggcttccgctatcgctgcagggatgccatgcgctcagtgactaagcaggccattcgggaggcaagattgaaggagatcaaggaagagcttctgcattctgagaagcttaagacatactttgaagacaaccctagggacctccagctgctgcggcatgacctacctttgcaccccgcagtggtgaagccccacctgggccatgttcctgactacctggttcctcctgctctccgtggcctggtgcgccctcacaagaagcggaagaagctgtcttcctcttgtaggaaggccaagagagcaaagtcccagaacccactgcgcagcttcaagcacaaaggaaagaaattcagacccacagccaagccctcctga

SEQ ID NO: 809 - DNA, 1785 bp, Homo Sapiens
atggcggcggccgtgcttagggattcgacttcggttcccgtgactgcagaagctaaacttatgggctttacacagggctgtgtgacctttgaggacgtggccatttacttctcccaggaagaatgggggctccttgatgaggctcagaggctcctgtaccgcgatgtgatgctggagaactttgcacttataactgcgctggtttgttggcatgggatggaggatgaagagacacctgagcaaagtgtttctgtagaaggagtacctcaggtcaggactccagaggccagtccatccacccagaagattcaatcctgtgacatgtgtgtcccattcctgaccgacattttgcacctgaccgatttgcctgggcaggaactatacttgactggggcatgtgcggtctttcaccaggaccagaagcatcatagtgcagagaaacccttggaaagtgacatggacaaggcctcatttgtgcagtgctgcctgttccatgagtcaggaatgcctttcaccagcagtgaggttgggaaggacttcctagccccattgggcattcttcagccgcaagctattgctaactatgagaagccaaacaaaatcagcaaatgtgaggaggcctttcatgttggaataagtcattacaagtggagtcaatgcaggagagagtccagccacaaacacactttttttcaccctagagtctgcactggaaaaaggctttatgaatctagcaaatgtgggaaagcctgctgctgtgagtgctcccttgttcagctgcaaagagtccaccctggagaaaggccttatgagtgcagtgaatgtgggaaatcttttagccaaacctctcatctgaatgatcatcggagaatccacactggagaaaggccttatgtgtgtggtcagtgtgggaaatcatttagccaaagagccaccctcattaaacatcacagagttcacactggagaaaggccttacgagtgtggtgaatgtgggaaatcttttagccaaagttccaaccttattgaacattgcagaattcacactggagaaaggccttatgagtgtgatgaatgtggaaaagcctttgggtccaaatccactcttgttcgacaccagagaactcacacaggagaaaagccatatgagtgtggtgaatgtgggaaattattcagacaaagcttcagccttgttgtacaccagagaattcacactacagcaaggccttatgagtgtggccagtgtgggaaatcatttagcctaaagtgtggcctcattcagcaccagttaattcacagtggagctaggccctttgagtgtgatgagtgcggaaaatcctttagccaaagaaccaccctcaataaacaccacaaagttcacactgcagaaaggccttatgtatgtggggaatgtgggaaagcttttatgttcaaatctaaacttgttaggcaccagagaactcacactggagaaaggccttttgagtgcagtgaatgtgggaaattttttagacaaagctataccctcgttgaacaccagaaaattcacactggattaaggccttacgactgtggacagtgcgggaaatcctttatccaaaagtctagcctcattcaacaccaagtggttcacacaggagaaaggccatatgagtgtggcaaatgtgggaagtcctttacacaacactctggcctcattctccaccgaaaatctcacactgtggagaggcctcgtgacagcagcaaatgtggaaaaccctacagcccaagatctaacattgtttaa

SEQ ID NO: 810 - DNA, 1905 bp, Homo Sapiens
atggcagaggagcaggagttcacccagctctgcaagttgcctgcacagccctcacacccacactgcgtgaacaacacctaccgcagcgcacagcactcccaggctctgctccgagggctgctggctctccgggacagcggaatcctcttcgatgttgtgctggtggtggagggcagacacatcgaggcccatcgcatcctgctggctgcgtcctgcgattacttcagaggaatgtttgctgggggattgaaggagatggaacaggaagaggtcctgatccacggtgtgtcctacaatgctatgtgccaaatcctacatttcatatacacctccgagctggagctcagcctgagcaatgtacaagagacactggtggctgcctgccagcttcagatcccagaaattatccatttctgctgtgatttcctcatgtcctgggtggacgaagagaacattctcgatgtctaccggctggcagagctgtttgacttgagccgcctgactgagcaactggacacctatatcctcaaaaactttgtggccttctctcggactgacaagtaccgccagcttccattggagaaggtctactccctcctcagcagcaatcgcctggaggtctcctgcgagaccgaggtatatgagggggcccttctctaccattatagcctggagcaggtgcaggctgaccagatctcgctgcacgagcccccaaagctccttgagacagtgcggtttccgctgatggaagctgaggtcctgcagcggctgcatgacaagctggaccccagccctttgagggacacagtggccagcgccctcatgtaccaccggaacgagagcctacagcccagcctgcagagcccgcaaacggagctgcggtcggacttccagtgcgttgtgggcttcgggggcattcactccacgccgtccactgtcctcagcgaccaggccaagtatctaaaccccttactgggagagtggaagcacttcactgcctccctggccccccgcatgtccaaccagggcatcgcggtgctcaacaacttcgtatacttgattggaggggacaacaatgtccaaggatttcgagcagagtcccgatgctggaggtatgacccacggcacaaccgctggttccagatccagtccctgcagcaggagcacgccgacctgtccgtgtgtgttgtaggcaggtacatctacgctgtggcgggccgtgactaccacaatgacctgaatgctgtggagcgctacgaccctgccaccaactcctgggcatacgtggccccactcaagagggaggtgtatgcccacgcaggcgcgacgctggaggggaagatgtatatcacctgcggccgcagaggggaggattacctgaaagagacacactgctacgatccaggcagcaacacttggcacacactggctgatgggcctgtgcggcgcgcctggcacggcatggcaaccctcctcaacaagctgtatgtgatcgggggcagcaacaacgatgccggatacaggagggacgtgcaccaggtggcctgctacagctgcacgtctggacagtggtcatctgtctgcccactccctgctgggcacggtgagcctggcattgctgtgctggacaacaggatctatgtgttaggtggccgctcacacaaccgcggcagccgcacaggctacgtgcacatttacgatgtggagaaggactgctgggaggaagggccccagctggacaactccatctcaggcctggcggcctgtgtgctcaccctgccccgctccctgctccttgagccgccccgcgggacccctgaccgcagccaggccgacccggactttgcctctgaggtgatgagtgtgtctgactgggaggagtttgacaactccagtgaggactag

SEQ ID NO: 811 - DNA, 426 bp, Homo Sapiens
atgtgggtcctaggcatcgcggcaactttttgcggattgttcttgcttccaggctttgcgctgcaaatccagtgctaccagtgtgaagaattccagctgaacaacgactgctcctcccccgagttcattgtgaattgcacggtgaacgttcaagacatgtgtcagaaagaagtgatggagcaaagtgccgggatcatgtaccgcaagtcctgtgcatcatcagcggcctgtctcatcgcctctgccgggtaccagtccttctgctccccagggaaactgaactcagtttgcatcagctgctgcaacacccctctttgtaacgggccaaggcccaagaaaaggggaagttctgcctcggccctcaggccagggctccgcaccaccatcctgttcctcaaattagccctcttctcggcacactgctga

SEQ ID NO: 812 - DNA, 870 bp, Homo Sapiens
atggcgggagctggtcgcggagcagcggtgtccagggtgcaggcgggtcctgggagtccccggcgagcgcgggggcggcagcaagtgcagccgctggggaagcagcgcccagccccgtggcccgggcttcgcagcaaagagaagaagaaagtgaactgcaagcccaagaaccaggacgaacaggagattcctttccggctccgggagattatgaggagccgccaagagatgaaaaacccgatcagtaacaagaagaggaagaaagcagcccaggtgaccttcagaaagacattggagaaggaagcaaagggagaggagcccgacatcgcagtccccaagttcaaacagaggaagggggagtccgacggggcctatatccaccgcatgcagcaagaggcccagcatgtgctgttcctcagcaagaaccaggccatccggcagccagaggtgcaggcagctcccaaggagaagtctgagcagaaaaaagcaaaaaaagcgttccagaagcggcgactagataaagtccgacggaaaaaggaggaaaaggcggcagacaggctggagcaggagttgctccgagacacggtgaagtttggtgaggttgtcctgcagcccccagagctgactgccaggccccagaggagcgtaagcaaggaccagcctggcaggagatcgcagatgctgcggatgcttctgagccccggtggtgtgtcccagcctctgaccgcctccctggcccgccagcggattgtggaggaggagagagagcgggccgtgcaggcctacagagcgttgaagcagcggcagcagcagctgcacggggagcgaccccacctcacttcccggaagaagccagagccgcagctgtga

SEQ ID NO: 813 - DNA, 2313 bp, Homo Sapiens
atgggtgatgaaaaggactcttggaaagtgaaaactttagatgaaattcttcaggaaaagaaacgaaggaaggaacaagaggagaaagcagagataaaacgcttaaaaaattctgatgaccgggattccaagcgggattcccttgaggagggggagctgagagatcactgcatggagatcacaataaggaactccccgtatagaagagaagactcaatggaagacagaggagaagaagatgattctttggccatcaaaccaccccagcaaatgtctcggaaagaaaaagttcatcacagaaaagatgaaaagagaaaagaaaaatggaagcatgctagagtgaaagaaagagagcacgaacgtcggaaacgacatcgagaagaacaggataaagctcgccgggaatgggaaagacagaagagaagggaaatggcaagggagcattccaggagagaaagggaccgcttggagcagttagaaaggaagcgggagcgggagcgcaagatgcgggagcagcagaaggagcagcgggagcagaaggagcgcgagcggcgggcggaggagcggcgcaaggagcgggaggcccgcagggaagtgtctgcacatcaccgaacgatgagagaggactacagcgacaaagtgaaagccagccactggagtcgcagcccgcctcggccgccgcgggagcggttcgagttgggagacggccggaagccagtaaaagaagagaaaatggaagaaagggacctgctgtccgacttacaggacatcagcgacagcgagaggaagaccagctcggccgagtcctcgtcagcggaatcaggctcaggttctgaggaagaagaggaggaggaggaagaggaggaggaggaagggagcaccagtgaagaatcagaggaggaggaggaggaagaggaagaggaggaggaggagaccggcagcaactctgaggaggcatcagagcagtctgccgaagaagtaagtgaggaagaaatgagtgaagatgaagaacgagaaaatgaaaaccacctcttggttgttccagagtcacggttcgaccgagattccggggagagtgaagaagcagaggaagaagtgggtgagggaacgccgcagagcagcgccctgacagagggcgactatgtgcccgactcccctgccctgttgcccatcgagctcaagcaggagctgcccaagtacctgccggccctgcagggctgccggagcgtcgaggagttccagtgcctgaacaggatcgaggagggcacctatggagtggtctacagagcaaaagacaagaaaacagatgaaattgtggctctaaagcggctgaagatggagaaggagaaggagggcttcccgatcacgtccctgagggagatcaacaccatcctcaaggcccagcatcccaacattgtcaccgttagagagattgtggtgggcagcaacatggacaagatctacatcgtgatgaactacgtggagcacgacctcaagagcctgatggagaccatgaaacagcccttcctgccaggggaggtgaagaccctgatgatccagctgctgcggggggtgaaacacctgcacgacaactggatcctgcaccgtgacctcaagacgtccaacctgctgctgagccacgccggcatcctcaaggtgggtgattttgggctggcgcgggagtacggatcccctctgaaggcctacaccccggtcgtggtgacccagtggtaccgcgccccagagctgctgcttggtgccaaggaatactccacggccgtggacatgtggtcagtgggctgcatcttcggggagctgctgactcagaagcctctgttccccgggaattcggaaatcgatcagatcaacaaagtgttcaaggagctggggacccccagtgagaaaatctggcccggctacagtgagctcccagtagtcaaaaagatgaccttcagcgagcacccctacaacaacctccgcaagcgcttcggggctctgctctcagaccagggcttcgacctcatgaacaagttcctgacctacttccccgggaggaggatcagcgctgaggacggcctcaagcatgagtatttccgcgagacccccctccccatcgacccctccatgttccccacgtggcccgccaagagcgagcagcagcgtgtgaagcggggcaccagcccgaggccccctgagggaggcctgggctacagccagctgggtgacgacgacctgaaggagacgggcttccaccttaccaccacgaaccagggggcctctgccgcgggccccggcttcagcctcaagttctga

SEQ ID NO: 814 - DNA, 810 bp, Homo Sapiens
atggcggctgcgctgttcgtgctgctgggattcgcgctgctgggcacccacggagcctccggggctgccggcacagtcttcactaccgtagaagaccttggctccaagatactcctcacctgctccttgaatgacagcgccacagaggtcacagggcaccgctggctgaaggggggcgtggtgctgaaggaggacgcgctgcccggccagaaaacggagttcaaggtggactccgacgaccagtggggagagtactcctgcgtcttcctccccgagcccatgggcacggccaacatccagctccacgggcctcccagagtgaaggctgtgaagtcgtcagaacacatcaacgagggggagacggccatgctggtctgcaagtcagagtccgtgccacctgtcactgactgggcctggtacaagatcactgactctgaggacaaggccctcatgaacggctccgagagcaggttcttcgtgagttcctcgcagggccggtcagagctacacattgagaacctgaacatggaggccgaccccggccagtaccggtgcaacggcaccagctccaagggctccgaccaggccatcatcacgctccgcgtgcgcagccacctggccgccctctggcccttcctgggcatcgtggctgaggtgctggtgctggtcaccatcatcttcatctacgagaagcgccggaagcccgaggacgtcctggatgatgacgacgccggctctgcacccctgaagagcagcgggcagcaccagaatgacaaaggcaagaacgtccgccagaggaactcttcctga

SEQ ID NO: 815 - DNA, 1797 bp, Homo Sapiens
atggtccagaagaccagcatgtcccggggcccttacccaccctcccaggagatccccatggaggtcttcgaccccagcccgcagggcaaatacagcaagaggaaagggcgattcaaacggtcagatgggagcacgtcctcggataccacatccaacagctttgtccgccagggctcagcggagtcctacaccagccgtccatcagactctgatgtatctctggaggaggaccgggaagccttaaggaaggaagcagagcgccaggcattagcgcagctcgagaaggccaagaccaagccagtggcatttgctgtgcggacaaatgttggctacaatccgtctccaggggatgaggtgcctgtgcagggagtggccatcaccttcgagcccaaagacttcctgcacatcaaggagaaatacaataatgactggtggatcgggcggctggtgaaggagggctgtgaggttggcttcattcccagccccgtcaaactggacagccttcgcctgctgcaggaacagaagctgcgccagaaccgcctcggctccagcaaatcaggcgataactccagttccagtctgggagatgtggtgactggcacccgccgccccacaccccctgccagtgccaaacagaagcagaagtcgacagagcatgtgcccccctatgacgtggtgccttccatgaggcccatcatcctggtgggaccgtcgctcaagggctacgaggttacagacatgatgcagaaagctttatttgacttcttgaagcatcggtttgatggcaggatctccatcactcgtgtgacggcagatatttccctggctaagcgctcagttctcaacaaccccagcaaacacatcatcattgagcgctccaacacacgctccagcctggctgaggtgcagagtgaaatcgagcgaatcttcgagctggcccggacccttcagttggtcgctctggatgctgacaccatcaatcacccagcccagctgtccaagacctcgctggcccccatcattgtttacatcaagatcacctctcccaaggtacttcaaaggctcatcaagtcccgaggaaagtctcagtccaaacacctcaatgtccaaatagcggcctcggaaaagctggcacagtgcccccctgaaatgtttgacatcatcctggatgagaaccaattggaggatgcctgcgagcatctggcggagtacttggaagcctattggaaggccacacacccgcccagcagcacgccacccaatccgctgctgaaccgcaccatggctaccgcagccctggctgccagccctgcccctgtctccaacctccagggaccctaccttgcttccggggaccagccactggaacgggccaccggggagcacgccagcatgcacgagtacccaggggagctgggccagcccccaggcctttaccccagcagccacccaccaggccgggcaggcacgctacgggcactgtcccgccaagacacttttgatgccgacacccccggcagccgaaactctgcctacacggagctgggagactcatgtgtggacatggagactgacccctcagaggggccagggcttggagaccctgcagggggcggcacgcccccagcccgacagggatcctgggaggacgaggaagaagactatgaggaagagctgaccgacaaccggaaccggggccggaataaggcccgctactgcgctgagggtgggggtccagttttggggcgcaacaagaatgagctggagggctggggacgaggcgtctacattcgctga

SEQ ID NO: 816 - DNA, 1251 bp, Homo Sapiens
atggagctacgtgtggggaacaagtaccgcctgggacggaagatcgggagcgggtccttcggagatatctacctgggtgccaacatcgcctctggtgaggaagtcgccatcaagctggagtgtgtgaagacaaagcacccccagctgcacatcgagagcaagttctacaagatgatgcagggtggcgtggggatcccgtccatcaagtggtgcggagctgagggcgactacaacgtgatggtcatggagctgctggggcctagcctcgaggacctgttcaacttctgttcccgcaaattcagcctcaagacggtgctgctcttggccgaccagatgatcagccgcatcgagtatatccactccaagaacttcatccaccgggacgtcaagcccgacaacttcctcatggggctggggaagaagggcaacctggtctacatcatcgacttcggcctggccaagaagtaccgggacgcccgcacccaccagcacattccctaccgggaaaacaagaacctgaccggcacggcccgctacgcttccatcaacacgcacctgggcattgagcaaagccgtcgagatgacctggagagcctgggctacgtgctcatgtacttcaacctgggctccctgccctggcaggggctcaaagcagccaccaagcgccagaagtatgaacggatcagcgagaagaagatgtcaacgcccatcgaggtcctctgcaaaggctatccctccgaattctcaacatacctcaacttctgccgctccctgcggtttgacgacaagcccgactactcttacctacgtcagctcttccgcaacctcttccaccggcagggcttctcctatgactacgtctttgactggaacatgctgaaattcggtgcagcccggaatcccgaggatgtggaccgggagcggcgagaacacgaacgcgaggagaggatggggcagctacgggggtccgcgacccgagccctgccccctggcccacccacgggggccactgccaaccggctccgcagtgccgccgagcccgtggcttccacgccagcctcccgcatccagccggctggcaatacttctcccagagcgatctcgcgggtcgaccgggagaggaaggtgagtatgaggctgcacaggggtgcgcccgccaacgtctcctcctcagacctcactgggcggcaagaggtctcccggatcccagcctcacagacaagtgtgccatttgaccatctcgggaagtga

SEQ ID NO: 817 - DNA, 687 bp, Homo Sapiens
atggtgaaatcctccctgcagcggatcctcaatagccactgcttcgccagagagaaggaaggggataaacccagcgccaccatccacgccagccgcaccatgccgctcctaagcctgcacagccgcggcggcagcagcagtgagagttccagggtctccctccactgctgtagtaacccgggtccggggcctcggtggtgctccgatgcccctcacccacccctgaagatcccaggtgggcgagggaatagtcagagggatcacaatctttcagctaacttattctactccgatgatcggctgaatgtaacagaggaactaacgtccaacgacaagacgaggattctcaacgtccagtccaggctcacagacgccaaacgcattaactggcgaacagtgctgagtggcggcagcctctacatcgagatcccgggcggcgcgctgcccgaggggagcaaggacagctttgcagttctcctggagttcgctgaggagcagctgcgagccgaccatgtcttcatttgcttccacaagaaccgcgaggacagagccgccttgctccgaaccttcagctttttgggctttgagattgtgagaccggggcatccccttgtccccaagagacccgacgcttgcttcatggcctacacgttcgagagagagtcttcgggagaggaggaggagtag

SEQ ID NO: 818 - DNA, 1947 bp, Homo Sapiens
atggagcacatacagggagcttggaagacgatcagcaatggttttggattcaaagatgccgtgtttgatggctccagctgcatctctcctacaatagttcagcagtttggctatcagcgccgggcatcagatgatggcaaactcacagatccttctaagacaagcaacactatccgtgttttcttgccgaacaagcaaagaacagtggtcaatgtgcgaaatggaatgagcttgcatgactgccttatgaaagcactcaaggtgaggggcctgcaaccagagtgctgtgcagtgttcagacttctccacgaacacaaaggtaaaaaagcacgcttagattggaatactgatgctgcgtctttgattggagaagaacttcaagtagatttcctggatcatgttcccctcacaacacacaactttgctcggaagacgttcctgaagcttgccttctgtgacatctgtcagaaattcctgctcaatggatttcgatgtcagacttgtggctacaaatttcatgagcactgtagcaccaaagtacctactatgtgtgtggactggagtaacatcagacaactcttattgtttccaaattccactattggtgatagtggagtcccagcactaccttctttgactatgcgtcgtatgcgagagtctgtttccaggatgcctgttagttctcagcacagatattctacacctcacgccttcacctttaacacctccagtccctcatctgaaggttccctctcccagaggcagaggtcgacatccacacctaatgtccacatggtcagcaccaccctgcctgtggacagcaggatgattgaggatgcaattcgaagtcacagcgaatcagcctcaccttcagccctgtccagtagccccaacaatctgagcccaacaggctggtcacagccgaaaacccccgtgccagcacaaagagagcgggcaccagtatctgggacccaggagaaaaacaaaattaggcctcgtggacagagagattcaagctattattgggaaatagaagccagtgaagtgatgctgtccactcggattgggtcaggctcttttggaactgtttataagggtaaatggcacggagatgttgcagtaaagatcctaaaggttgtcgacccaaccccagagcaattccaggccttcaggaatgaggtggctgttctgcgcaaaacacggcatgtgaacattctgcttttcatggggtacatgacaaaggacaacctggcaattgtgacccagtggtgcgagggcagcagcctctacaaacacctgcatgtccaggagaccaagtttcagatgttccagctaattgacattgcccggcagacggctcagggaatggactatttgcatgcaaagaacatcatccatagagacatgaaatccaacaatatatttctccatgaaggcttaacagtgaaaattggagattttggtttggcaacagtaaagtcacgctggagtggttctcagcaggttgaacaacctactggctctgtcctctggatggccccagaggtgatccgaatgcaggataacaacccattcagtttccagtcggatgtctactcctatggcatcgtattgtatgaactgatgacgggggagcttccttattctcacatcaacaaccgagatcagatcatcttcatggtgggccgaggatatgcctccccagatcttagtaagctatataagaactgccccaaagcaatgaagaggctggtagctgactgtgtgaagaaagtaaaggaagagaggcctctttttccccagatcctgtcttccattgagctgctccaacactctctaccgaagatcaaccggagcgcttccgagccatccttgcatcgggcagcccacactgaggatatcaatgcttgcacgctgaccacgtccccgaggctgcctgtcttctag

SEQ ID NO: 819 - DNA, 585 bp, Homo Sapiens
atgttcagttcgagcgccaagatcgtgaagcccaatggcgagaagccggacgagttcgagtccggcatctcccaggctcttctggagctggagatgaactcggacctcaaggctcagctcagggagctgaatattacggcagctaaggaaattgaagttggtggtggtcggaaagctatcataatctttgttcccgttcctcaactgaaatctttccagaaaatccaagtccggctagtacgcgaattggagaaaaagttcagtgggaagcatgtcgtctttatcgctcagaggagaattctgcctaagccaactcgaaaaagccgtacaaaaaataagcaaaagcgtcccaggagccgtactctgacagctgtgcacgatgccatccttgaggacttggtcttcccaagcgaaattgtgggcaagagaatccgcgtcaaactagatggcagccggctcataaaggttcatttggacaaagcacagcagaacaatgtggaacacaaggttgaaactttttctggtgtctataagaagctcacgggcaaggatgttaattttgaattcccagagtttcaattgtaa

SEQ ID NO: 820 - DNA, 498 bp, Homo Sapiens
atgttgatgcctaagaagaaccggattgccatttatgaactcctttttaaggagggagtcatggtggccaagaaggatgtccacatgcctaagcacccggagctggcagacaagaatgtgcccaaccttcatgtcatgaaggccatgcagtctctcaagtcccgaggctacgtgaaggaacagtttgcctggagacatttctactggtaccttaccaatgagggtatccagtatctccgtgattaccttcatctgcccccggagattgtgcctgccaccctacgccgtagccgtccagagactggcaggcctcggcctaaaggtctggagggtgagcgacctgcgagactcacaagaggggaagctgacagagatacctacagacggagtgctgtgccacctggtgccgacaagaaagccgaggctggggctgggtcagcaaccgaattccagtttagaggcggatttggtcgtggacgtggtcagccacctcagtaa

SEQ ID NO: 821 - DNA, 1104 bp, Homo Sapiens
atgagctctccgccgcccgcccgcagtggcttttaccgccaggaggtgaccaagacggcctgggaggtgcgcgccgtgtaccgggacctgcagcccgtgggctcgggcgcctacggcgcggtgtgctcggccgtggacggccgcaccggcgctaaggtggccatcaagaagctgtatcggcccttccagtccgagctgttcgccaagcgcgcctaccgcgagctgcgcctgctcaagcacatgcgccacgagaacgtgatcgggctgctggacgtattcactcctgatgagaccctggatgacttcacggacttttacctggtgatgccgttcatgggcaccgacctgggcaagctcatgaaacatgagaagctaggcgaggaccggatccagttcctcgtgtaccagatgctgaaggggctgaggtatatccacgctgccggcatcatccacagagacctgaagcccggcaacctggctgtgaacgaagactgtgagctgaagatcctggacttcggcctggccaggcaggcagacagtgagatgactgggtacgtggtgacccggtggtaccgggctcccgaggtcatcttgaattggatgcgctacacgcagacggtggacatctggtctgtgggctgcatcatggcggagatgatcacaggcaagacgctgttcaagggcagcgaccacctggaccagctgaaggagatcatgaaggtgacggggacgcctccggctgagtttgtgcagcggctgcagagcgatgaggccaagaactacatgaagggcctccccgaattggagaagaaggattttgcctctatcctgaccaatgcaagccctctggctgtgaacctcctggagaagatgctggtgctggacgcggagcagcgggtgacggcaggcgaggcgctggcccatccctacttcgagtccctgcacgacacggaagatgagccccaggtccagaagtatgatgactcctttgacgacgttgaccgcacactggatgaatggaagcgtgttacttacaaagaggtgctcagcttcaagcctccccggcagctgggggccagggtctccaaggagacgcctctgtga

SEQ ID NO: 822 - DNA, 2304 bp, Homo Sapiens
atgagctttgatccaaaccttctccacaacaatggacataatgggtaccctaatggtacttcagcagcactgcgtgaaactggggttattgaaaaactgttaacctcttacggatttattcagtgttcagaacgtcaagctagacttttcttccactgttcacagtataatggcaacctgcaagacttaaaagtaggagatgatgttgaatttgaagtatcatcggaccgacggactgggaaacccattgctgttaaactggtgaagataaaacaagaaatcctccctgaagaacgaatgaatggacaagaagtgttttatctgacttacacccctgaagatgtcgaagggaacgttcagctggaaactggagataaaataaactttgtaattgataacaataaacatactggtgctgtaagtgctcgcaacattatgctgttgaaaaagaaacaagcccgctgtcagggagtagtttgtgccatgaaggaggcatttggctttattgaaagaggtgatgttgtaaaagagatattctttcactatagtgaatttaagggtgacttagaaaccttacagcctggcgatgatgtggaattcacaatcaaggacagaaatggtaaagaagttgcaacagatgtcagactattgcctcaaggaacagtcatttttgaagatatcagcattgaacattttgaaggaactgtaaccaaagttatcccaaaagtacccagtaaaaaccagaatgacccattgccaggacgcatcaaagttgactttgtgatccctaaagaacttccctttggagacaaagatacgaaatccaaggtgaccctgctggaaggtgaccatgttaggtttaatatttcaacagaccgacgtgacaaattagagcgagcaaccaatatagaagttctgtcaaatacatttcagttcactaatgaagcccgagaaatgggtgtgattgctgccatgagagatggttttggtttcatcaagtgtgtggatcgtgatgttcgtatgttcttccacttcagtgaaattctggatgggaaccagctccatattgcagatgaagtagagtttactgtggttcctgatatgctctctgctcaaagaaatcatgctattaggattaaaaaacttcccaagggcacggtttcatttcattcccattcagatcaccgttttctgggcacggtagaaaaagaagccactttttccaatcctaaaaccactagcccaaataaaggcaaagagaaggaggctgaggatggcattattgcttatgatgactgtggggtgaaactgactattgcttttcaagccaaggatgtggaaggatctacttctcctcaaataggagataaggttgaatttagtattagtgacaaacagaggcctggacagcaggttgcaacttgtgtgcgacttttaggtcgtaattctaactccaagaggctcttgggttatgtggcaactctgaaggataattttggatttattgaaacagccaatcatgataaggaaatctttttccattacagtgagttctctggtgatgttgatagcctggaactgggggacatggtcgagtatagcttgtccaaaggcaaaggcaacaaagtcagtgcagaaaaagtgaacaaaacacactcagtgaatggcattactgaggaagctgatcccaccatttactctggcaaagtaattcgccccctgaggagtgttgatccaacacagactgagtaccaaggaatgattgagattgtggaggagggcgatatgaaaggtgaggtctatccatttggcatcgttgggatggccaacaaaggggattgcctgcagaaaggggagagcgtcaagttccaattgtgtgtcctgggccaaaatgcacaaactatggcttacaacatcacacccctgcgcagggccacagtggaatgtgtgaaagatcagtttggcttcattaactatgaagtaggagatagcaagaagctctttttccatgtgaaagaagttcaggatggcattgagctacaggcaggagatgaggtggagttctcagtgattcttaatcagcgcactggcaagtgcagcgcctgtaatgtttggcgagtctgtgagggccccaaggctgttgcagctcctcgacctgatcggttggtcaatcgcttgaagaatatcactctggatgatgccagtgctcctcgcctaatggttcttcgtcagccaaggggaccagataactcaatggggtttggtgcagaaagaaagatccgtcaagctggtgtcattgactaa

SEQ ID NO: 823 - DNA, 3381 bp, Homo Sapiens
atggagcctaatgatagtaccagtaccgctgtggaggagcctgacagcttggaggtgttggtgaagaccttggactctcaaactcgtacctttattgtgggggcccagatgaatgtaaaagagtttaaggagcacattgctgcctctgtcagcatcccatctgaaaaacaacggctcatttaccagggacgagttctgcaagatgataagaagcttcaggaatacaatgttgggggaaaggttatccacctggtggaacgggctcctcctcagactcacctcccttctggggcatcttctgggacggggtctgcctcagccactcatggtgggggatccccccctggtactcgggggcctggggcctctgttcatgaccggaatgccaacagctatgtcatggttggaaccttcaatcttcctagtgacggctctgctgtggatgttcacatcaacatggaacaggccccgattcagagtgagccccgggtacggctggtgatggctcagcacatgatcagggatatacagaccttactatcccggatggagtgtcgaggagggccccaaccgcagcacagtcagccgcccccgcagccaccggctgtgaccccggagccagtagccttgagctctcaaacatcagaaccagttgaaagtgaagcacctccccgggagcccatggaggcagaagaagtggaggagcgtgccccagcccagaacccggagctcactcctggcccagccccagcgggcccaacacctgccccggaaacaaatgcacccaaccatccttcccctgcggagtatgtcgaggtgctccaggagctacagcggctggagagtcgcctccagcccttcttgcagcgctactacgaggttctgggtgctgctgccaccacggactacaataacaatcacgagggccgggaggaggatcagcggttgatcaacttggtaggggagagcctgcgactgctgggcaacacctttgttgcactgtctgacctgcgctgcaatctggcctgcacgcccccacgacacctgcatgtggtccggcctatgtctcactacaccacccccatggtgctccagcaggcagccattcccatacagatcaatgtgggaaccactgtgaccatgacaggaaatgggactcggccccccccaactcccaatgcagaggcacctccccctggtcctgggcaggcctcatccgtggctccgtcttctaccaatgtcgagtcctcagctgagggggctcccccgccaggtccagctcccccgccagccaccagccacccgagggtcatccggatttcccaccagagtgtggaacccgtggtcatgatgcacatgaacattcaagattctggcacacagcctggtggtgttccgagtgctcccactggccccctgggaccccctggtcatggccaaaccctgggacagcaggtgccaggcttcccaacagctccaacccgggtggtgattgcccggcccactcctccacaggctcggccttcccatcctggagggcccccagtctctgggacactgcagggcgccggtctgggtaccaatgcctcgttggcccagatggtgagcggccttgtggggcagcttcttatgcagccagtccttgtggctcaggggaccccaggtatggctccaccgccagcccctgccactgcttctgccagtgctggcaccaccaacacagctaccacagctggccccgctcctggggggcctgcccagcctccacccacccctcaaccctccatggctgatcttcagttctctcagcttctggggaacctgctagggcctgcagggccaggggctggagggtctggtgtggcttctcccaccatcactgtggcgatgcctggtgtccctgcctttctccaaggcatgactgacttcttgcaggcaacacagacagcccctccaccacccccacctcctccacccccaccacctgccccagagcagcagaccatgcccccaccaggctccccttctggtggcgcagggagtcctggaggcctgggtcttgagagcctgtcaccggagttttttacctcagtggtgcagggtgtgctcagctccctgctgggctccctgggggctcgggctggcagcagtgaaagtattgctgccttcatacaacgcctcagtggatccagcaacatctttgagcctggagctgatggggcccttggattctttggggccttgctttctcttctgtgccagaacttctctatggtggacgtagtgatgcttctccatgggcatttccagccactacaacggctccagccccagctgcgatccttcttccaccagcactacctgggtggtcaggagcccacacccagtaacatccggatggcaacccacacattgatcacggggctagaagagtatgtgcgggagagtttttccttggtgcaggttcagccaggtgtggacatcatccggacaaacctggaatttctccaagagcagtttaatagcattgctgcgcatgtgctgcattgcacagatagtggatttggggcccggttgctggagttgtgtaaccaaggcctgtttgaatgcctggccctaaacctgcactgcttggggggacagcagatggagcttgctgctgttatcaatggccgaattcgtcgtatgtctcgtggggtgaatccctccttggtgagctggctgaccactatgatgggactgaggcttcaggtggtactggagcacatgcctgtaggccctgatgccattctcagatacgttcgcagggttggtgatcccccccagccacttcctgaggagccaatggaagttcagggagcagaaagagcttcccctgagcctcagcgggagaatgcttccccagcccctggaacaacagcagaagaggccatgtcccgaggtccacctcctgctcctgaggggggctcccgggatgaacaggatggagcttcagctgagacagaaccttgggcagctgcagtccccccagaatgggtccctattatccagcaggacattcagagccagcggaaggtgaaaccgcagccccctctgagtgatgcctacctcagtggtatgcctgccaagagacgcaagacgatgcagggtgagggcccccagctgcttctctcagaggctgtgagccgggcagctaaggcagccggagctcggcccctgacgagccccgagagcctgagccgggacctggaggcaccagaggttcaggagagctacaggcagcagctccggtctgatatacaaaaacgactgcaggaagaccccaactacagtccccagcgcttccccaatgcccagcgggcctttgctgatgatccttag

SEQ ID NO: 824 - DNA, 2892 bp, Homo Sapiens
atggcagtagccccgcgactgtttggggggctctgcttccgtttccgggaccagaatccggaagtggctgttgaggggcgtcttccaatctcgcacagctgcgttggctgtagaagagaacggacggcgatggcgacggtcgcagcaaatccagctgctgctgcggcggctgtggcggcggcagcggcggtgactgaggatagagagccacagcacgaggagctgccaggcctggacagccagtggcgccagatagaaaacggcgagagtgggcgagaacgtccactgcgggccggcgaaagctggttccttgtggagaagcactggtataagcagtgggaggcatacgtgcagggaggggaccaggactccagcaccttccctggctgcatcaacaatgccacactctttcaagatgagataaactggcgcctcaaggagggactggtggaaggcgaggattatgtgctgctcccagcagctgcttggcattacctggtcagctggtatggtctagagcatggccagccacccattgaacgcaaggtcatagagctgcccaacatccagaaggtcgaagtgtacccagtagaactgctgcttgtccggcacaatgatttgggcaaatctcacactgttcagttcagccataccgattctattggcctagtattgcgcacagctcgggagcggtttctggtggagccccaggaagacactcggctttgggccaagaactcagaaggctctttggataggttgtatgacacacacatcacggttctcgatgcggcccttgagactgggcagttgatcatcatggagacccgcaagaaagatggcacttggcccagcgcacagctgcatgtcatgaacaacaacatgtcggaagaggatgaggacttcaagggtcagccaggcatctgtggcctcaccaatctgggcaacacgtgcttcatgaactcggccctgcagtgcctcagcaatgtgccacagctcaccgagtacttcctcaacaactgctacctggaggagctcaacttccgcaacccactgggcatgaagggtgagatcgcagaggcctatgcagacctggtgaagcaggcgtggtctggccaccaccgctccattgtgccacatgtgttcaagaacaaggttggccattttgcatcccaatttctgggctaccagcagcatgactctcaggagctgctgtcattcctcctggacgggctgcatgaggaccttaatcgggtgaagaagaaggagtatgtggagctgtgcgatgctgctgggcgaccggatcaggaggtggcacaggaggcatggcaaaaccacaaacggcggaacgattctgtgatcgtggacactttccacggcctcttcaagtccacgctggtgtgccccgattgtggcaatgtatctgtgaccttcgaccccttctgctacctcagtgttccactgcctatcagccacaagagggtcttggaggtcttctttatccccatggatccgcgccgcaagccagagcagcaccggctcgtggtccccaagaaaggcaagatctcggatctatgtgtggctctgtccaaacacacgggcatctcgccagagaggatgatggtggctgatgtcttcagtcaccgcttctataagctctatcagctagaggagcctctgagcagcatcttggaccgtgatgatatcttcgtctatgaggtgtcaggtcgcattgaggccattgagggctcaagagaggacatcgtggttcctgtctacctgcgggagcgcacccctgcccgtgactacaacaactcctactacggcctgatgctttttggacaccccctcctggtatcagtgccccgggaccgcttcacctgggagggcctgtataacgtcctgatgtaccggctctcacgctacgtgaccaaacccaactcagatgatgaggacgatggggatgagaaagaagatgacgaggaggataaagatgacgtccctgggccctcaactgggggcagcctccgagaccctgagccagagcaggctgggcccagctctggagtcacgaacaggtgcccgttcctcctggacaattgccttggcacatctcagtggcccccaaggcgacgacgcaagcagctgttcaccctgcagacggtgaactccaatgggaccagcgaccgcacaacctcccctgaagaagtccatgcccagccgtacattgctatcgactgggagccagagatgaagaagcgttactatgacgaggtagaggctgagggctacgtgaagcatgactgcgtcgggtacgtgatgaagaaggctcccgtgcggctgcaggagtgcattgagctcttcaccactgtggagaccctggagaaggaaaacccctggtactgcccttcctgcaagcagcaccagctggcaaccaagaagctggacctgtggatgctgccggagattctcatcatccacctgaaacgcttttcctacaccaagttctcccgagagaagctggacaccctcgtggagtttcctatccgggacctggacttctctgagtttgtcatccagccacagaatgagtcgaatccggagctgtacaaatatgacctcatcgcggtttccaaccattatgggggcatgcgtgatggacactacacaacatttgcctgcaacaaggacagcggccagtggcactactttgatgacaacagcgtctcccctgtcaatgagaatcagatcgagtccaaggcagcctatgtcctcttctaccaacgccaggacgtggcgcgacgcctgctgtccccggccggctcatctggcgccccagcctcccctgcctgcagctccccacccagctctgagttcatggatgttaattga

SEQ ID NO: 825 - DNA, 1587 bp, Homo Sapiens
atgggggacgctcccagccctgaagagaaactgcaccttatcacccggaacctgcaggaggttctgggggaagagaagctgaaggagatactgaaggagcgggaacttaaaatttactggggaacggcaaccacgggcaaaccacatgtggcttactttgtgcccatgtcaaagattgcagacttcttaaaggcagggtgtgaggtaacaattctgtttgcggacctccacgcatacctggataacatgaaagccccatgggaacttctagaactccgagtcagttactatgagaatgtgatcaaagcaatgctggagagcattggtgtgcccttggagaagctcaagttcatcaaaggcactgattaccagctcagcaaagagtacacactagatgtgtacagactctcctccgtggtcacacagcacgattccaagaaggctggagctgaggtggtaaagcaggtggagcaccctttgctgagtggcctcttataccccggactgcaggctttggatgaagagtatttaaaagtagatgcccaatttggaggcattgatcagagaaagattttcacctttgcagagaagtacctccctgcacttggctattcaaaacgggtccatctgatgaatcctatggttccaggattaacaggcagcaaaatgagctcttcagaagaggagtccaagattgatctccttgatcggaaggaggatgtgaagaaaaaactgaagaaggccttctgtgagccaggaaatgtggagaacaatggggttctgtccttcatcaagcatgtcctttttccccttaagtccgagtttgtgatcctacgagatgagaaatggggtggaaacaaaacctacacagcttacgtggacctggaaaaggactttgctgctgaggttgtacatcctggagacctgaagaattctgttgaagtcgcactgaacaagttgctggatccaatccgggaaaagtttaatacccctgccctgaaaaaactggccagcgctgcctacccagatccctcaaagcagaagccaatggccaaaggccctgccaagaattcagaaccagaggaggtcatcccatcccggctggatatccgtgtggggaaaatcatcactgtggagaagcacccagatgcagacagcctgtatgtagagaagattgacgtgggggaagctgaaccacggactgtggtgagcggcctggtacagttcgtgcccaaggaggaactgcaggacaggctggtagtggtgctgtgcaacctgaaaccccagaagatgagaggagtcgagtcccaaggcatgcttctgtgtgcttctatagaagggataaaccgccaggttgaacctctggaccctccggcaggctctgctcctggtgagcacgtgtttgtgaagggctatgaaaagggccaaccagatgaggagctcaagcccaagaagaaagtcttcgagaagttgcaggctgacttcaaaatttctgaggagtgcatcgcacagtggaagcaaaccaacttcatgaccaagctgggctccatttcctgtaaatcgctgaaaggggggaacattagctag

SEQ ID NO: 826 - DNA, 1200 bp, Homo Sapiens
atggaggacggcgtctatgaacccccagacctgactccggaggagcggatggagctggagaacatccggcggcggaagcaggagctgctggtggagattcagcgcctgcgggaggagctcagtgaagccatgagcgaggtggaggggctggaggccaatgagggcagtaagaccttgcaacggaaccggaagatggcaatgggcaggaagaagttcaacatggaccccaagaaggggatccagttcttggtggagaatgaactgctgcagaacacacccgaggagatcgcccgcttcctgtacaagggcgaggggctgaacaagacagccatcggggactacctgggggagagggaagaactgaacctggcagtgctccatgcttttgtggatctgcatgagttcaccgacctcaatctggtgcaggccctcaggcagtttctatggagctttcgcctacccggagaggcccagaaaattgaccggatgatggaggccttcgcccagcgatactgcctgtgcaaccctggggttttccagtccacagacacgtgctatgtgctgtccttcgccgtcatcatgctcaacaccagtctccacaatcccaatgtccgggacaagccgggcctggagcgctttgtggccatgaaccggggcatcaacgagggcggggacctgcctgaggagctgctcaggaacctgtacgacagcatccgaaatgagcccttcaagattcctgaggatgacgggaatgacctgacccacaccttcttcaacccggaccgggagggctggctcctgaagctggggggccgggtgaagacgtggaagcggcgctggtttatcctcacagacaactgcctctactactttgagtacaccacggacaaggagccccgaggaatcatccccctggagaatctgagcatccgagaggtggacgacccccggaaaccgaactgctttgaactttacatccccaacaacaaggggcagctcatcaaagcctgcaaaactgaggcggacggccgagtggtggagggaaaccacatggtgtaccggatctcggcccccacgcaggaggagaaggacgagtggatcaagtccatccaggcggctgtgagtgtggaccccttctatgagatgctggcagcgagaaagaagcggatttcagtcaagaagaagcaggagcagccctga

SEQ ID NO: 827 - DNA, 900 bp, Homo Sapiens
atggaggaattcgactccgaagacttctctacgtcggaggaggacgaggactacgtgccgtcgggtggagagtatagtgaagatgatgtaaatgaattagtgaaggaagatgaagtggatggtgaagagcagacacagaaaacccaagggaaaaaaagaaaggcccagagcattccagccaggaagagaagacaaggtggcctctcattagaagaagaggaagaggaggatgccaattcagaatctgagggaagcagtagtgaggaggaagatgacgctgcagagcaggaaaaaggcattggatcagaggatgccaggaaaaagaaggaggacgaactctgggccagcttcctcaatgatgtgggaccaaaatcaaaagtgcccccaagtacacaagttaagaaaggagaggagactgaagagacaagttcaagtaaattgttggtaaaagcagaagagctagagaaacctaaagaaacagaaaaagttaaaatcaccaaggtgtttgattttgctggtgaagaagtaagggtaactaaggaagtggatgctacatctaaagaggccaaatccttcttcaagcagaatgagaaagaaaaaccacaggctaatgttccttcagctctgccatcactccctgccgggtcagggttaaaaagatcaagtggcatgagcagccttttggggaaaattggtgccaagaagcagaaaatgagcacccttgagaagtccaaactggactgggagagcttcaaggaggaagaggggattggtgaagaactggccatccataatcgagggaaagaggggtacattgaacggaaagccttccttgaccgagtggatcacaggcagtttgaaattgagcgagatctcaggctgagcaaaatgaaaccttga

SEQ ID NO: 828 - DNA, 1005 bp, Homo Sapiens
atggcgacggaggagaagaagcccgagaccgaggccgccagagcacagccaaccccttcgtcatccgccactcagagcaagcctacacctgtgaagccaaactatgctctaaagttcacccttgctggccacaccaaagcagtgtcctccgtgaaattcagcccgaatggagagtggctggcaagttcatctgctgataaacttattaaaatttggggcgcgtatgatgggaaatttgagaaaaccatatctggtcacaagctgggaatatccgatgtagcctggtcgtcagattctaaccttcttgtttctgcctcagatgacaaaaccttgaagatatgggacgtgagctcgggcaagtgtctgaaaaccctgaagggacacagtaattatgtcttttgctgcaacttcaatccccagtccaaccttattgtctcaggatcctttgacgaaagcgtgaggatatgggatgtgaaaacagggaagtgcctcaagactttgccagctcactcggatccagtctcggccgttcattttaatcgtgatggatccttgatagtttcaagtagctatgatggtctctgtcgcatctgggacaccgcctcaggccagtgcctgaagacgctcatcgatgacgacaacccccccgtgtcttttgtgaagttctccccgaacggcaaatacatcctggccgccacgctggacaacactctgaagctctgggactacagcaaggggaagtgcctgaagacgtacactggccacaagaatgagaaatactgcatatttgccaatttctctgttactggtgggaagtggattgtgtctggctcagaggataaccttgtttacatctggaaccttcagacgaaagagattgtacagaaactacaaggccacacagatgtcgtgatctcaacagcttgtcacccaacagaaaacatcatcgcctctgctgcgctagaaaatgacaaaacaattaaactgtggaagagtgactgctaa

SEQ ID NO: 829 - DNA, 900 bp, Homo Sapiens
atggcccagaacttgaaggacttggcgggacggctgcccgccgggccccggggcatgggcacggccctgaagctgttgctgggggccggcgccgtggcctacggtgtgcgcgaatctgtgttcaccgtggaaggcgggcacagagccatcttcttcaatcggatcggtggagtgcagcaggacactatcctggccgagggccttcacttcaggatcccttggttccagtaccccattatctatgacattcgggccagacctcgaaaaatctcctcccctacaggctccaaagacctacagatggtgaatatctccctgcgagtgttgtctcgacccaatgctcaggagcttcctagcatgtaccagcgcctagggctggactacgaggaacgagtgttgccgtccattgtcaacgaggtgctcaagagtgtggtggccaagttcaatgcctcacagctgatcacccagcgggcccaggtatccctgttgatccgccgggagctgacagagagggccaaggacttcagcctcatcctggatgatgtggccatcacagagctgagctttagccgagagtacacagctgctgtagaagccaaacaagtggcccagcaggaggcccagcgggcccaattcttggtagaaaaagcaaagcaggaacagcggcagaaaattgtgcaggccgagggtgaggccgaggctgccaagatgcttggagaagcactgagcaagaaccctggctacatcaaacttcgcaagattcgagcagcccagaatatctccaagacgatcgccacatcacagaatcgtatctatctcacagctgacaaccttgtgctgaacctacaggatgaaagtttcaccaggggaagtgacagcctcatcaagggtaagaaatga

SEQ ID NO: 830 - DNA, 354 bp, Homo Sapiens
atgaagtggatgttcaaggaggaccactcgctggaacacagatgcgtggagtccgcgaagattcgagcgaaatatcccgacagggttccggtgattgtggaaaaggtctcaggctctcagattgttgacattgacaaacggaagtacttggttccatctgatatcactgtggctcagttcatgtggatcatcaggaaaaggatccagcttccttctgaaaaggcgatcttcctgtttgtggataagacagtcccacagtccagcctaactatgggacagctttacgagaaggaaaaagatgaagatggattcttatatgtggcctacagcggagagaacacttttggcttctga

SEQ ID NO: 831 - DNA, 1728 bp, Homo Sapiens
atggatcccaggggtatcttgaaggcatttcccaagcggcagaaaattcatgctgatgcatcatcaaaagtacttgcaaagattcctaggagggaagagggagaagaagcagaagagtggctgagctcccttcgggcccatgttgtgcgcactggcattggacgagcccgggcagaactctttgagaagcagattgttcagcatggcggccagctatgccctgcccagggcccaggtgtcactcacattgtggtggatgaaggcatggactatgagcgagccctccgccttctcagactaccccagctgcccccgggtgctcagctggtgaagtcagcctggctgagcttgtgccttcaggagaggaggctggtggatgtagctggattcagcatcttcatccccagtaggtacttggaccatccacagcccagcaaggcagagcaggatgcttctattcctcctggcacccatgaggccctgcttcagacagccctttctcctcctcctcctcccaccaggcctgtgtctcctccccaaaaggcaaaagaggcaccaaacacccaagcccagcccatctctgatgatgaagccagtgatggggaagaaacccaggttagtgcagctgatctggaagccctcatcagtggccactaccccacctcccttgagggagattgtgagcctagcccagcccctgctgtcctggataagtgggtctgtgcacagccctcaagccagaaggcgaccaatcacaacctccatatcacagagaagctggaagttctggccaaagcctacagtgttcagggagacaagtggagggccctgggctatgccaaggccatcaatgccctcaagagcttccataagcctgtcacctcgtaccaggaggcctgcagtatccctgggattgggaagcggatggctgagaaaatcatagagatcctggagagcgggcatttgcggaagctggaccatatcagtgagagcgtgcctgtcttggagctcttctccaacatctggggagctgggaccaagactgcccagatgtggtaccaacagggcttccgaagtctggaagacatccgcagccaggcctccctgacaacccagcaggccatcggcctgaagcattacagtgacttcctggaacgtatgcccagggaggaggctacagagattgagcagacagtccagaaagcagcccaggcctttaactctgggctgctgtgtgtggcatgtggttcataccgacggggaaaggcgacctgtggtgatgtcgacgtgctcatcactcacccagatggccggtcccaccggggtatcttcagccgcctccttgacagtcttcggcaggaagggttcctcacagatgacttggtgagccaagaggagaatggtcagcaacagaagtacttgggggtgtgccggctcccagggccagggcggcggcaccggcgcctggacatcatcgtggtgccctatagcgagtttgcctgtgccctgctctacttcaccggctctgcacacttcaaccgctccatgcgagccctggccaaaaccaagggcatgagtctgtcagaacatgccctcagcactgctgtggtccggaacacccatggctgcaaggtggggcctggccgagtgctgcccactcccactgagaaggatgtcttcaggctcttaggcctcccctaccgagaacctgctgagcgggactggtga

SEQ ID NO: 832 - DNA, 1296 bp, Homo Sapiens
atggcggcgaacctgagccggaacgggccagcgctgcaagaggcctacgtgcgggtggtcaccgagaagtccccgaccgactgggctctctttacctatgaaggcaacagcaatgacatccgcgtggctggcacaggggagggtggcctggaggagatggtggaggagctcaacagcgggaaggtgatgtacgccttctgcagagtgaaggaccccaactctggactgcccaaatttgtcctcatcaactggacaggcgagggcgtgaacgatgtgcggaagggagcctgtgccagccacgtcagcaccatggccagcttcctgaagggggcccatgtgaccatcaacgcacgggccgaggaggatgtggagcctgagtgcatcatggagaaggtggccaaggcttcaggtgccaactacagctttcacaaggagagtggccgcttccaggacgtgggaccccaggccccagtgggctctgtgtaccagaagaccaatgccgtgtctgagattaaaagggttggtaaagacagcttctgggccaaagcagagaaggaggaggagaaccgtcggctggaggaaaagcggcgggccgaggaggcacagcggcagctggagcaggagcgccgggagcgtgagctgcgtgaggctgcacgccgggagcagcgctatcaggagcagggtggcgaggccagcccccagagcaggacgtgggagcagcagcaagaagtggtttcaaggaaccgaaatgagcaggagtctgccgtgcacccgagggagattttcaagcagaaggagagggccatgtccaccacctccatctccagtcctcagcctggcaagctgaggagccccttcctgcagaagcagctcacccaaccagagacccactttggcagagagccagctgctgccatctcaaggcccagggcagatctccctgctgaggagccggcgcccagcactcctccatgtctggtgcaggcagaagaggaggctgtgtatgaggaacctccagagcaggagaccttctacgagcagcccccactggtgcagcagcaaggtgctggctctgagcacattgaccaccacattcagggccaggggctcagtgggcaagggctctgtgcccgtgccctgtacgactaccaggcagccgacgacacagagatctcctttgaccccgagaacctcatcacgggcatcgaggtgatcgacgaaggctggtggcgtggctatgggccggatggccattttggcatgttccctgccaactacgtggagctcattgagtga

SEQ ID NO: 833 - DNA, 2088 bp, Homo Sapiens
atggactgctacacggcgaactggaacccactcggggactctgccttttaccggaaatatgagctgtacagcatggactgggacctgaaggaggaactcagggattgcctggtggctgctgcaccctatgggggccccattgcactgctgaggaacccctggcggaaggagaaagctgctagtgtgaggccagtgctcgatatatactctgcttccggcatgcctctggccagcctgctgtggaagagtggacccgtggtgtccctgggctggtcagctgaggaggagctgctctgtgtgcaggaagatggtgctgtactggtttatgggcttcatggtgacttccggagacacttcagcatgggcaatgaagtgctccagaaccgggttctggatgcccggatctttcacactgagtttggttccggagtggccatcctcacaggggcccaccgcttcaccctcagtgccaatgtgggtgacctcaaactccgccggatgccagaggtgccaggtctgcaaagtgcaccctcctgctggactgtgctgtgccaggaccgagtggcacacattcttctggctgtggggcctgacctttacctcttggaccatgcagcctgctccgcagtgacgccccctggcctggccccaggagtaagcagcttcctacagatggctgtctccttcacctaccgacacctggcactcttcacagacacaggctacatctggatggggacagcatcactcaaggagaagctatgtgagttcaactgcaacatccgggcacctccaaagcagatggtctggtgcagccgtcctcgtagcaaggagagggccgtggtggtggcctgggaaaggcggctgatggtggtgggcgatgcacccgagagcatccaatataagcagctcaccatccaggtgctgctggacaggctcgtgttgcggagactttaccccctggccatccagatatgcgagtacttgcgccttcctgaagtacagggcgtcagcaggatcctggcccactgggcctgctacaaggtgcaacagaaggatgtctcagatgaggatgtggctcgagccattaaccagaagctgggggacacgcctggtgtctcttactccgacattgctgcacgagcctatggttgtggccgcacggagctggccatcaagctgctggagtatgagccacgctcaggggagcaggtaccccttctcctaaagatgaagaggagcaaactggcactaagcaaggccatcgagagcggggacactgacctggtgttcacggtgttgctgcacctgaagaacgagctgaaccgaggagattttttcatgacccttcggaatcagcccatggccctcagtttgtaccgacagttctgtaagcatcaggagctagagacgctgaaggacctttacaatcaggatgacaatcaccaggaattgggcagcttccacatccgagccagctatgctgcagaagagcgtattgaggggcgagtagcagctctgcagacagccgccgatgccttctacaaggccaagaatgagtttgcagccaaggctacagaggatcaaatgcggctcctacggctgcagcggcgcctagaagacgagctggggggccagttcctagacctgtctctacatgacacagttaccaccctcattcttggcggtcacaacaagcgtgcagagcagctggcacgtgacttccgcatccctgacaagaggctctggtggctgaagctgactgccctggcagatttggaagattgggaagagctagagaagttttccaagagcaagaaatcacccattggctacctgccttttgtggagatctgcatgaaacaacataacaaatacgaagccaagaagtatgcttcccgcgtgggtcccgagcagaaggtcaaggctttgcttcttgttggcgatgtggctcaggctgcagatgtggccatcgaacaccggaatgaggctgagctgagcctcgtattgtcccactgcacgggagccacagatggggccacagctgacaagattcaacgggccagggcacaagcccagaagaagtga

SEQ ID NO: 834 - DNA, 747 bp, Homo Sapiens
atgcgcctcattcagaacatgtgcaccatcgccgagtaccccgcgccgggcaacgccgcggcctccgactgctgtgtgggcgccgccggccgccgcctggtcaagatcgccgtggtgggcgccagcggcgtgggcaagaccgcactggtggtccggttcctcaccaaacgattcatcggtgactatgaaagaaatgcaggtaatctctatactagacaagttcagatagaaggtgaaaccctggctcttcaggttcaagacactccaggtattcaggtccatgagaacagcctgagctgcagtgaacagctgaataggtgcattcgctgggcagatgctgtggtgatcgttttctccatcactgactacaagagctatgaactcatcagccagctccaccagcacgtgcagcagctacacctgggcacccggctgcctgtggtggtcgtggccaacaaagctgacctgttgcacatcaaacaggttgaccctcagcttggactgcagctagccagcatgctaggctgctcattctatgaagtgtctgtcagtgaaaattataatgatgtctacagcgccttccacgtcctctgtaaagaggtcagtcacaaacagcagcctagcagtacacccgagaagcgaagaacctccctcattcccaggcccaagtcacccaacatgcaggacctgaagaggaggtttaagcaagccctctctgccaaagtgaggactgtcacctccgtctga

SEQ ID NO: 835 - DNA, 903 bp, Homo Sapiens
atggagccaccgatggagccgtccggaggggagcaagagcccggagccgtcaggttcctggacctgccctgggaagacgtgctgctcccacacgtcctgaaccgggtcccgctgcgccagctgctccggctgcagcgcgttagccgggccttccggtcgctggtgcagcttcacctggccgggctgcgtcgcttcgatgccgcgcaggtgggtccgcagatcccgcgggccgcattggcccggctgctgcgggatgccgaggggctgcaggagctggcactggcgccgtgtcacgaatggctgtcagacgaggacctggtgccggtgctggcgcggaatccgcagctgcggagtgtggcgttgggcggctgcgggcaactgagtcgccgggcgcttggggctttggccgagggctgcccacgcctgcagcgcctgtcgctcgcgcactgtgactgggtggacgggctggcgctgcgcggcctcgctgatcgctgcccggccctggaggagctggatctcaccgcctgccgccagctcaaggacgaggccatcgtgtacctggcgcagaggcgcggcgctggtctccgcagcctctctctggccgtcaacgccaacgtgggggacgccgcggttcaagagttggctcggaactgcccagaactccaccaccttgacctcaccggctgcctccgcgtcggaagcgacggtgtcaggacattggccgagtactgccccgtgctgcgttcgctgcgggtgcggcactgccaccatgtggcggagtccagcctgagccgcttgcggaagcgcggcgtggacatcgacgtggagccgccgctgcaccaggccctggtgctgctgcaggatatggcgggcttcgcaccttttgtcaacctgcaggtctga

SEQ ID NO: 836 - DNA, 1815 bp, Homo Sapiens
atgatgaagtcccaggggttagtatcattcaaggatgtggctgtggatttcacccaggaggagtggcagcaacttgacccttctcagaggaccctgtacagggatgtgatgctggagaactacagccacctggtctcaatggggtatccagtttccaaaccagatgtcatctccaagttggaacaaggagaagagccatggatcataaagggagacatatcaaattggatctatccagatgaatatcaggcagatgggagacaagacaggaagagtaaccttcacaactcccagtcatgtattttggggacagtttccttccatcataagatactgaaaggagtcacaagggatggttcattgtgctccattttaaaagtctgtcaaggtgatggtcagctgcagagatttctagagaatcaagacaaactcttcaggcaggtcacatttgttaacagcaaaacagtgactgaggcatcagggcataaatataatccactggggaaaatatttcaagagtgcatagaaacagatatatcaatacagagattccataaatatgatgcttttaaaaagaacttaaaaccaaatattgacctaccgagttgttataagagcaattcaagaaaaaaacctgatcagagttttggaggtggaaaatcatctagccagagtgagcccaattctaatcttgagaagattcacaatggagtaataccttttgatgataatcagtgtggaaacgtttttagaaatacacaatcccttattcaatatcagaatgtggaaactaaagagaaaagctgtgtatgtgttacatgtggaaaagcctttgctaagaagtcacaactcattgtacatcaaagaattcatactggaaagaaaccatatgattgtggtgcatgcggaaaagccttcagtgagaagtttcatcttgttgtacatcagagaactcatactggggagaaaccttatgattgttctgaatgtggaaaagccttctctcagaaatcgtcccttattatacatcagagagttcacactggggaaaaaccctatgaatgtagtgaatgcgggaaagccttctcccagaaatcacccctcattatacatcagagaatacatactggggaaaaaccctatgaatgtagagagtgtgggaaggccttttcccagaagtcacagctgattatacaccacagagctcatactggagagaagccgtatgagtgtaccgaatgtgggaaagccttctgtgagaagtcccacctcattatacataaaagaattcacactggtgagaaaccctacaaatgtgctcaatgtgaggaagccttcagcaggaagacagaactcattacacatcagttagttcatactggggaaaaaccttatgaatgtactgaatgtggaaagacattctcccgcaagtcacagctcatcatacatcagagaacacatactggagaaaaaccctataaatgtagtgaatgtggcaaagccttctgccagaagtcacatctcattggacatcagagaattcacacaggagaaaaaccttatatatgtactgaatgtgggaaagccttctctcagaagtcccaccttccgggacaccagcgaattcatacaggagagaaaccttacatatgtgctgaatgtggaaaggccttttctcagaagtcagaccttgttttacatcagaggattcatactggggaaagaccctatcaatgtgctatatgtgggaaggccttcatccagaagtcacaactaactgtacaccagagaattcacacagtggtaaaatcataa

SEQ ID NO: 837 - DNA, 1569 bp, Homo Sapiens
atgcagccttggcacggaaaggccatgcagagagcttccgaggccggagccactgcccccaaggcttccgcacggaatgccaggggcgccccgatggatcccaccgagtctccggctgcccccgaggccgccctgcctaaggcgggaaagttcggccccgccaggaagtcgggatcccggcagaaaaagagcgccccggacacccaggagaggccgcccgtccgcgcaactggggcccgcgccaaaaaggcccctcagcgcgcccaggacacgcagccgtctgacgccaccagcgcccctggggcagaggggctggagcctcctgcggctcgggagccggctctttccagggctggttcttgccgccagaggggcgcgcgctgctccacgaagccaagacctccgcccgggccctgggacgtgcccagccccggcctgccggtctcggcccccattctcgtacggagggatgcggcgcctggggcctcgaagctccgggcggttttggagaagttgaagctcagccgcgatgatatctccacggcggcggggatggtgaaaggggttgtggaccacctgctgctcagactgaagtgcgactccgcgttcagaggcgtcgggctgctgaacaccgggagctactatgagcacgtgaagatttctgcacctaatgaatttgatgtcatgtttaaactggaagtccccagaattcaactagaagaatattccaacactcgtgcatattactttgtgaaatttaaaagaaatccgaaagaaaatcctctgagtcagtttttagaaggtgaaatattatcagcttctaagatgctgtcaaagtttaggaaaatcattaaggaagaaattaacgacattaaagatacagatgtcatcatgaagaggaaaagaggagggagccctgctgtaacacttcttattagtgaaaaaatatctgtggatataaccctggctttggaatcaaaaagtagctggcctgctagcacccaagaaggcctgcgcattcaaaactggctttcagcaaaagttaggaagcaactacgactaaagccattttaccttgtacccaagcatgcaaaggaaggaaatggtttccaagaagaaacatggcggctatccttctctcacatcgaaaaggaaattttgaacaatcatggaaaatctaaaacgtgctgtgaaaacaaagaagagaaatgttgcaggaaagattgtttaaaactaatgaaataccttttagaacagctgaaagaaaggtttaaagacaaaaaacatctggataaattctcttcttatcatgtgaaaactgccttctttcacgtatgtacccagaaccctcaagacagtcagtgggaccgcaaagacctgggcctctgctttgataactgcgtgacatactttcttcagtgcctcaggacagaaaaacttgagaattattttattcctgaattcaatctattctctagcaacttaattgacaaaagaagtaaggaatttctgacaaagcaaattgaatatgaaagaaacaatgagtttccagtttttgatgaattttga

SEQ ID NO: 838 - DNA, 3381 bp, Homo Sapiens
atggtggcacgcagcactgacagcctggatggcccaggggagggctcggtgcagcctctacccactgctggggggcccagtgtgaaggggaagcctgggaagaggctctcagctcctcgaggccccttcccgcggctggctgactgcgcccatttccactacgagaacgttgactttggccacattcagctcctgctgtctccagaccgtgaagggcccagcctctctggagagaatgagctggtgttcggggtgcaggtgacctgtcagggccgttcctggccggttctccggagttacgatgactttcgttccctggatgcccacctccaccggtgcatatttgaccggaggttctcctgccttccggagcttcccccgccccccgagggtgccagggctgcccagatgctggtgccactgctgctgcagtacctggagacactgtcaggactggtggacagtaacctcaactgcgggcctgtgctcacctggatggagctggacaatcacggccggcgactgctcctcagtgaggaggcgtcactcaatatccctgcagtggcggccgcccatgtgatcaaacggtatacagcccaggcgccagatgagctgtcctttgaggtgggagacattgtctcggtgatcgacatgccacccacagaggatcggagctggtggcggggcaagcgaggcttccaggtcgggttcttccccagtgagtgtgtggaactcttcacagagcggccaggtccgggcctgaaggcggatgccgatggccccccatgtggcatcccggctccccagggtatctcgtctctgacctcagctgtgccacggcctcgtgggaagctggccggcctgctccgcaccttcatgcgctcccgcccttctcggcagcggctgcggcagcggggaatcctgcgacagagggtgtttggctgcgatcttggcgagcacctcagcaactcaggccaggatgtgccccaggtgctgcgctgctgctccgagttcattgaggcccacggggtggtggatgggatctaccggctctcaggcgtgtcttccaacatccagaggcttcggcacgagtttgacagtgagaggatcccggagctgtctggccctgcattcctgcaggacatccacagcgtgtcctccctctgcaagctctacttccgagagcttccgaaccctctgctcacctaccagctctatgggaagttcagtgaggccatgtcagtgcctggggaggaggagcgtctggtgcgggtgcacgatgtcatccagcagctgcccccaccacattacaggaccctggagtacctgctgaggcacctggcccgcatggcgagacacagtgccaacaccagcatgcatgcccgcaacctggccattgtctgggcacccaacctgctacggtccatggagctggagtcagtgggaatgggtggcgcggcggcgttccgggaagttcgggtgcagtcggtggtggtggagtttctgctcacccatgtggacgtcctgttcagcgacaccttcacctccgccggcctcgaccctgcaggccgctgcctgctccccaggcccaagtcccttgcgggcagctgcccctccacccgcctgctgacgctggaggaagcccaggcacgcacccagggccggctggggacgcccacggagcccacaactcccaaggccccggcctcacctgcggaaaggaggaaaggggagagaggggagaagcagcggaagccagggggcagcagctggaagacgttctttgcactgggccggggccccagtgtccctcgaaagaagcccctgccctggctggggggcacccgtgccccaccgcagccttcaggcagcagacccgacaccgtcacactgagatctgccaagagcgaggagtctctgtcatcgcaggccagcggggctgaactgctgggggctgggggagcacctgcctcagccaccccaacaccagctctcagccccggccggagcctgcgcccccatctcatacccctgctgctgcgaggagccgaggccccgctgactgacgcctgccagcaggagatgtgcagcaagctccggggagcccagggcccactcggtcctgatatggagtcaccactgccaccccctcccctgtctctcctgcgccctgggggtgccccacccccgccccctaagaacccagcacgcctcatggccctggccctggctgagcgggctcagcaggtggccgagcaacagagccagcaggagtgtgggggcaccccacctgcttcccaatcccccttccaccgctcgctgtctctggaggtgggcggggagcccctggggacctcagggagtgggccacctcccaactccctagcacacccgggtgcctgggtcccgggacccccaccctacttaccaaggcaacaaagtgatgggagcctgctgaggagccagcggcccatggggacctcaaggaggggactccgaggccctgcccaggtcagtgcccagctcagggcaggtggcgggggcagggatgcgccagaggcagcagcccagtccccatgttctgtcccctcacaggttcctacccccggcttcttctccccagcccccagggagtgcctgccacccttcctcggggtccccaagccaggcttgtaccccctgggccccccatccttccagcccagttccccagccccagtctggaggagctctctgggcccccctgcaccactcgacaggggagagaacctgtactatgagatcggggcaagtgaggggtccccctattctggccccacccgctcctggagtccctttcgctccatgccccccgacaggctcaatgcctcctacggcatgcttggccaatcacccccactccacaggtcccccgacttcctgctcagctacccgccagccccctcctgctttccccctgaccaccttggctactcagccccccagcaccctgctcggcgccctacaccgcctgagcccctctacgtcaacctagctctagggcccaggggtccctcacctgcctcttcctcctcctcttcccctcctgcccacccccgaagccgttcagatcccggtcccccagtcccccgccttccccagaaacaacgggcaccctggggaccccgtacccctcatagggtgccgggtccctggggccctcctgagcctctcctgctctacagggcagccccgccagcctacggaagggggggcgagctccaccgagggtccttgtacagaaatggagggcaaagaggggagggggctggtcccccacccccttaccccactcccagctggtccctccactctgagggccagacccgaagctactgctga

SEQ ID NO: 839 - DNA, 567 bp, Homo Sapiens
atgacagagacccgtgagccagctgagactgggggctacgccagcttggaagaagatgatgaagacctttccccaggccccgagcattcctctgattcagaatacactctctcagagccggactccgaagaggaagaagatgaggaggaggaggaagaggagaccactgacgatcctgaatatgatcctggctacaaggtgaagcagcgccttggcgggggccgtggtggcccatcccgccgggccccccgtgcagcccagcccccggcccagccttgccagctctgtggccgctcaccccttggggaggccccaccgggaaccccaccctgccggctctgctgccctgctacagccccccaggaagcaccagcccctgaaggcagggccctcggggaggaagaggaggaaccacctcgggctggggagggccgaccagctgggcgggaggaggaggaggaagaggaggaggagggaacctaccactgtacggaatgtgaggattccttcgacaacctgggggagctgcacgggcacttcatgctgcatgcccggggtgaggtgtag

SEQ ID NO: 840 - DNA, 963 bp, Homo Sapiens
atgtctaagtcagcgtctccaaaagagcccgaacagctgaggaagctcttcattggagggttgagctttgaaacaactgatgagagcctgaggagccattttgagcaatggggaacgctcacagactgtgtggtaatgagagatccaaacaccaagcgctccaggggctttgggtttgtcacatatgccactgtggaggaggtggatgcagctatgaatacaacgccacacaaggtggatggaagagttgtggaaccaaagagagctgtctccagagaagattctcaaagaccaggtgcccacttaactgtgaaaaagatatttgttggtggcattaaagaagacactgaagaacatcacctaagagattattttgaacagtatggaaaaattgaagtaattgaaatcatgactgaccgaggcagtggcaagaaaaggggctttgcctttgtaacctttgacgaccatgactccgtggataagattgtcattcagaaataccatactgtgaagggccacaactgtgaagttagaaaagccctgccaaagcaagagatggctagtgcttcatccagccaaagaggtcgaaggggttctggaaactttggtggtggtcgtggagatggtttcggtgggaatgacaactttggtcgtggaggaaacttcagtggtcgtggtggctttggtggcagctgtggtggtggtggatatggtggcagtggggatggctataatggatttggtaatgatggaagcaattttggaggtggtggaagctacaatgattttggcaattacaacaatcagtcttcaaattttggacccatgaagggaggaaattttggaggcagaagctctggcccctatggcggtggaggccaatactttgcaaaaccacaaaaccaaggtggctatggcgtttccagcagcagcagtagctatggcagtggcagaagattttaa

SEQ ID NO: 841 - DNA, 447 bp, Homo Sapiens
atgacaccacccagcaccccaaatcctgcagagtgtggaggggatctggggagaaggcaggggctgcccgggcgctctggctgctgggggtgggggacagggcctgccggggaagcgggtcgggggaggactggagacccaggctcccctaggtacaacgaacctcgcgggagggaatacgccatccccgtacccacttccgaggacgtaggtcttttggcaccggcggcagccgcgttcccacacatctgggcggggccccgcagcatggcctggggagctgaggcttcgggatccggcacaaactaccattctaggtgtagacggaggaggtggggtgtgggaagcagggggccatggtctgagcagaccttctcacctctgggcctcccacctcctggggcaggacttacggggaaggacccgaggggagtggggtgtccatag

SEQ ID NO: 842 - DNA, 1272 bp, Homo Sapiens
atggcgggcaagcggtccggctggagccgggcggctctcctccagctccttctcggcgtgaacctggtggtgatgccgcccacccgggcccggagtctgcgcttcgttaccttgctgtaccgccatggagaccgttcaccagtgaagacatatcccaaggacccctatcaggaagaagaatggccccaggggtttggtcagttaaccaaggaggggatgctacagcactgggaactgggccaggccctgcggcagcgctatcacggcttcctaaacacctcttatcaccggcaagaggtttatgtgcgaagcacagactttgaccggactctcatgagtgctgaggccaacctggctggactcttccctcccaacgggatgcagcgcttcaacccgaacatctcgtggcagcctattcctgtgcacactgtgcccatcactgaggacaggctgctgaagttcccgttgggcccatgtccccgttatgagcagctgcagaacgagacccggcagacaccagagtatcagaatgagagttctcggaatgcacaatttctggacatggtggccaacgagacagggcttacagacctgacactggagaccgtctggaatgtctatgacacactcttctgtgagcaaacgcacgggctgcgcctgccgccctgggcctcaccccaaaccatgcagcgtctcagccggctaaaggacttcagcttccgcttcctcttcggaatctaccagcaggcggagaaggcccggcttcaggggggagtcctgctggctcagataaggaagaacctgaccctaatggcgaccacctcccagctccccaagctgctggtttactctgcgcacgacactaccctggttgccctgcaaatggcactggatgtctacaatggtgaacaagccccctacgcctcctgccacatatttgaactgtaccaggaagattctgggaatttctcagtggagatgtactttcggaacgagagtgacaaggccccctggccgctcagcctgcctggctgccctcaccgctgcccactgcaggacttccttcgcctcacagagcccgtcgtgcccaaggattggcagcaggagtgccagctggcaagcggtcctgcagacacagaggtgattgtggccttggctgtatgtggctccatcctcttcctcctcatagtgctgctcctcaccgtcctcttccggatgcaggcccagcctcctggctaccgccacgtcgcagatggggaggaccacgcctga

SEQ ID NO: 843 - DNA, 2736 bp, Homo Sapiens
atggtggactaccacgcggcgaaccagtcgtaccagtacggccccagcagcgcgggcaatggcgctggcggcgggggcagcatgggcgactacatggcccaggaggacgactgggaccgggacctgctgctggacccggcctgggagaagcagcagcgcaagaccttcacggcatggtgcaactcccacctgcggaaggcaggcacacagatcgagaacattgatgaggacttccgagacgggctcaagctcatgctgctcctggaggtcatatcaggggagcggttacctaagccggagcgggggaagatgagagtgcacaaaatcaacaatgtgaacaaagcgctggactttattgccagcaaaggcgtcaagctggtctccatcggggcagaagagattgtggacggcaacgcaaagatgaccctgggaatgatctggaccatcatccttaggttcgccatccaggacatctccgtggaagagacctcggccaaggaagggctccttctctggtgccagagaaagacagccccgtataagaacgtcaatgtgcagaacttccacatcagctggaaggatggtcttgccttcaatgccctgatccaccggcacagaccagagctgattgagtatgacaagctgaggaaggacgaccctgtcaccaacctgaacaatgccttcgaagtggctgagaaatacctcgacatccccaagatgctggatgcagaggacatcgtgaacacggcccggcccgacgagaaggccataatgacctatgtgtccagcttctaccatgccttttcaggagcgcagaaggctgaaactgccgccaaccggatctgtaaggtgctggctgtcaaccaagagaacgagcacctgatggaggactacgagaagctggccagcgacctcctggagtggatccggcgcaccatcccctggctggaggaccgtgtgccccaaaagactatccaggagatgcagcagaagctggaggacttccgcgactaccggcgtgtgcacaagccgcccaaggtgcaggagaagtgccagctggagatcaacttcaacacgctgcagaccaagctgcgcctcagcaaccggcccgccttcatgccctccgagggcaagatggtctcggacatcaacaatggctggcagcacttggagcaggctgagaagggctacgaggagtggctgctgaatgagatccgcaggctggagcggctcgaccacctggcagagaagttccggcagaaggcctccatccacgaggcctggactgacgggaaggaagccatgctgaagcaccgggactacgagacggccacactatcggacatcaaagccctcattcgcaagcacgaggccttcgagagcgacctggctgcgcaccaggaccgcgtggagcagatcgccgccattgcccaggagctcaacgagctggattactacgactcccacaatgtcaacacccggtgccagaagatctgtgaccagtgggacgccctcggctctctgacacatagtcgcagggaagccctggagaaaacagagaagcagctggaggccatcgaccagctgcacctggaatacgccaagcgcgcggcccccttcaacaactggatggagagcgccatggaggacctccaggacatgttcatcgtccataccatcgaggagattgagggcctgatctcagcccatgaccagttcaagtccaccctgccggacgccgatagggagcgcgaggccatcctggccatccacaaggaggcccagaggatcgctgagagcaaccacatcaagctgtcgggcagcaacccctacaccaccgtcaccccgcaaatcatcaactccaagtgggagaaggtgcagcagctggtgccaaaacgggaccatgccctcctggaggagcagagcaagcagcagtccaacgagcacctgcgccgccagttcgccagccaggccaatgttgtggggccctggatccagaccaagatggaggagatcgggcgcatctccattgagatgaacgggaccctggaggaccagctgagccacctgaagcagtatgaacgcagcatcgtggactacaagcccaacctggacctgctggagcagcagcaccagctcatccaggaggccctcatcttcgacaacaagcacaccaactataccatggagcacatccgcgtgggctgggagcagctgctcaccaccattgcccgcaccatcaacgaggtggagaaccagatcctcacccgcgacgccaagggcatcagccaggagcagatgcaggagttccgggcgtccttcaaccacttcgacaaggatcatggcggggcgctggggcccgaggagttcaaggcctgcctcatcagcctgggctacgacgtggagaacgaccggcagggtgaggccgagttcaaccgcatcatgagcctggtcgaccccaaccatagcggccttgtgaccttccaagccttcatcgacttcatgtcgcgggagaccaccgacacggacacggctgaccaggtcatcgcttccttcaaggtcttagcaggggacaagaacttcatcacagctgaggagctgcggagagagctgccccccgaccaggccgagtactgcatcgcccgcatggcgccataccagggccctgacgccgtgcccggtgccctcgactacaagtccttctccacggccttgtatggcgagagcgacctgtga

SEQ ID NO: 844 - DNA, 510 bp, Homo Sapiens
atgttggctaccagggtatttagcctagttggcaagcgagcaatttccacctctgtgtgtgtacgagctcatgaaagtgttgtgaagagcgaagacttttcgctcccagcttatatggatcggcgtgaccaccccttgccggaggtggcccatgtcaagcacctgtctgccagccagaaggcactgaaggagaaggagaaggcctcctggagcagcctctccatggatgagaaagtcgagttgtatcgcattaagttcaaggagagctttgctgagatgaacaggggctcgaacgagtggaagacggttgtgggcggtgccatgttcttcatcggtttcaccgcgctcgttatcatgtggcagaagcactatgtgtacggccccctcccgcaaagctttgacaaagagtgggtggccaagcagaccaagaggatgctggacatgaaggtgaaccccatccagggcttagcctccaagtgggactacgaaaagaacgagtggaagaagtga

SEQ ID NO: 845 - DNA, 1023 bp, Homo Sapiens
atgagtgagctggagcaactgagacaggaggccgagcagctccggaaccagatccgggatgcccgaaaagcatgtggggactcaacactgacccagatcacagctgggctggacccagtggggagaatccagatgaggacccggaggaccctccgtgggcacctggcaaagatctatgccatgcactgggggaccgactcaaggctgctggtcagcgcctcccaggatgggaagctcatcatctgggacagctacaccaccaacaaggtccacgccatcccgctgcgctcctcctgggtaatgacctgtgcctacgcgccctcagggaactttgtggcctgtggggggttggacaacatctgctccatctacagcctcaagacccgcgagggcaacgtcagggtcagccgggagctgcctggccacactgggtacctgtcgtgttgccgcttcctggatgacaaccaaatcatcaccagctctggggataccacctgtgccctgtgggacattgagacaggccagcagacagtgggttttgctggacacagtggggatgtgatgtccctgtccctggcccccgatggccgcacgtttgtgtcaggcgcctgtgatgcctctatcaagctgtgggacgtgcgggattccatgtgccgacagaccttcatcggccatgaatccgacatcaatgcagtggctttcttccccaacggctacgccttcaccaccggctctgacgacgccacgtgccgcctcttcgacctgcgggccgatcaggagctcctcatgtactcccatgacaacatcatctgtggcatcacctctgttgccttctcgcgcagcggacggctgctgctcgctggctacgacgacttcaactgcaacatctgggatgccatgaagggcgaccgtgcaggagtcctcgctggccacgacaaccgcgtgagctgcctcggggtcaccgacgatggcatggctgtggccacgggctcctgggactccttcctcaagatctggaactaa

SEQ ID NO: 846 - DNA, 642 bp, Homo Sapiens
atgtccgagactgctcctgccgctcccgctgccgcgcctcctgcggagaaggcccctgtaaagaagaaggcggccaaaaaggctgggggtacgcctcgtaaggcgtctggtcccccggtgtcagagctcatcaccaaggctgtggccgcctctaaagagcgtagcggagtttctctggctgctctgaaaaaagcgttggctgccgccggctatgatgtggagaaaaacaacagccgtatcaaacttggtctcaagagcctggtgagcaagggcactctggtgcaaacgaaaggcaccggtgcttctggctcctttaaactcaacaagaaggcagcctccggggaagccaagcccaaggttaaaaaggcgggcggaaccaaacctaagaagccagttggggcagccaagaagcccaagaaggcggctggcggcgcaactccgaagaagagcgctaagaaaacaccgaagaaagcgaagaagccggccgcggccactgtaaccaagaaagtggctaagagcccaaagaaggccaaggttgcgaagcccaagaaagctgccaaaagtgctgctaaggctgtgaagcccaaggccgctaagcccaaggttgtcaagcctaagaaggcggcgcccaagaagaaatag

SEQ ID NO: 847 - DNA, 2718 bp, Homo Sapiens
atggcaaaaagagccctgcatgattttattgacaagtatctctatgccatgcggctctccgatgaaactctcatagatatcatgactcgcttcaggaaggagatgaagaatggcctctcccgggattttaatccaacagccacagtcaagatgttgccaacattcgtaaggtccattcctgatggctctgaaaagggagatttcattgccctggatcttggtgggtcttcctttcgaattctgcgggtgcaagtgaatcatgagaaaaaccagaatgttcacatggagtccgaggtttatgacaccccagagaacatcgtgcacggcagtggaagccagctttttgatcatgttgctgagtgcctgggagatttcatggagaaaaggaagatcaaggacaagaagttacctgtgggattcacgttttcttttccttgccaacaatccaaaatagatgaggccatcctgatcacctggacaaagcgatttaaagcgagcggagtggaaggagcagatgtggtcaaactgcttaacaaagccatcaaaaagcgaggggactatgatgccaacatcgtagctgtggtgaatgacacagtgggcaccatgatgacctgtggctatgacgaccagcactgtgaagtcggcctgatcatcggcactggcaccaatgcttgctacatggaggaactgaggcacattgatctggtggaaggagacgaggggaggatgtgtatcaatacagaatggggagcctttggagacgatggatcattagaagacatccggacagagtttgacagggagatagaccggggatccctcaaccctggaaaacagctgtttgagaagatggtcagtggcatgtacttgggagagctggttcgactgatcctagtcaagatggccaaggagggcctcttatttgaagggcggatcaccccggagctgctcacccgagggaagtttaacaccagtgatgtgtcagccatcgaaaagaataaggaaggcctccacaatgccaaagaaatcctgacccgcctgggagtggagccgtccgatgatgactgtgtctcagtccagcacgtttgcaccattgtctcatttcgctcagccaacttggtggctgccacactgggcgccatcttgaaccgcctgcgtgataacaagggcacacccaggctgcggaccacggttggtgtcgacggatctctttacaagacgcacccacagtattcccggcgtttccacaagactctaaggcgcttggtgccagactccgatgtgcgcttcctcctctcggagagtggcagcggcaagggggctgccatggtgacggcggtggcctaccgcttggccgagcagcaccggcagatagaggagaccctggctcatttccacctcaccaaggacatgctgctggaggtgaagaagaggatgcgggccgagatggagctggggctgaggaagcagacgcacaacaatgccgtggttaagatgctgccctccttcgtccggagaactcccgacgggaccgagaatggtgacttcttggccctggatcttggaggaaccaatttccgtgtgctgctggtgaaaatccgtagtgggaaaaagagaacggtggaaatgcacaacaagatctacgccattcctattgaaatcatgcagggcactggggaagagctgtttgatcacattgtctcctgcatctctgacttcttggactacatggggatcaaaggccccaggatgcctctgggcttcacgttctcatttccctgccagcagacgagtctggacgcgggaatcttgatcacgtggacaaagggttttaaggcaacagactgcgtgggccacgatgtagtcaccttactaagggatgcgataaaaaggagagaggaatttgacctggacgtggtggctgtggtcaacgacacagtgggcaccatgatgacctgtgcttatgaggagcccacctgtgaggttggactcattgttgggaccggcagcaatgcctgctacatggaggagatgaagaacgtggagatggtggagggggaccaggggcagatgtgcatcaacatggagtggggggcctttggggacaacgggtgtctggatgatatcaggacacactacgacagactggtggacgaatattccctaaatgctgggaaacaaaggtatgagaagatgatcagtggtatgtacctgggtgaaatcgtccgcaacatcttaatcgacttcaccaagaagggattcctcttccgagggcagatctctgagacgctgaagacccggggcatctttgagaccaagtttctctctcagatcgagagtgaccgattagcactgctccaggtccgggctatcctccagcagctaggtctgaatagcacctgcgatgacagtatcctcgtcaagacagtgtgcggggtggtgtccaggagggccgcacagctgtgtggcgcaggcatggctgcggttgtggataagatccgcgagaacagaggactggaccgtctgaatgtgactgtgggagtggacgggacactctacaagcttcatccacacttctccagaatcatgcaccagacggtgaaggaactgtcaccaaaatgtaacgtgtccttcctcctgtctgaggatggcagcggcaagggggccgccctcatcacggccgtgggcgtgcggttacgcacagaggcaagcagctaa

SEQ ID NO: 848 - DNA, 1056 bp, Homo Sapiens
atggcatcctactacgagatcctagacgtgccgcgaagtgcgtccgctgatgacatcaagaaggcgtatcggcgcaaggctctccagtggcacccagacaaaaacccagataataaagagtttgctgagaagaaatttaaggaggtggccgaggcatatgaagtgctgtctgacaagcacaagcgggagatttacgaccgctatggccgggaagggctgacagggacaggaactggcccatctcgggcagaagctggcagtggtgggcctggcttcaccttcaccttccgcagccccgaggaggtcttccgggaattctttgggagtggagacccttttgcagagctctttgatgacctgggccccttctcagagcttcagaaccggggttcccgacactcaggccccttctttaccttctcttcctccttccctgggcactccgatttctcctcctcatctttctccttcagtcctggggctggtgcttttcgctctgtttctacatctaccacctttgtccaaggacgccgcatcaccacacgcagaatcatggagaacgggcaggagcgggtggaagtggaggaggatgggcagctgaagtcagtcacaatcaatggtgtcccagatgacctggcacgtggcttggagctgagccgtcgcgagcagcagccgtcagtcacttccaggtctgggggcactcaggtccagcagacccctgcctcatgccccttggacagcgacctctctgaggatgaggacctgcagctggccatggcctacagcctgtcagagatggaggcagctgggaagaaacccgcaggtgggcgggaggcacagcaccgacggcaggggcgcccaaggcccagcaccaagatccaggcttgggggggacccaggagggtgcgaggggtgaagcaaccaaacgcagtccatccccagaggagaaggcctctcgctgcctcatcctctgaacaccgggcccaacctgatctgatccagatcttgactggggggtctgactcactgtgggaagagaagaggggagtatcctga

SEQ ID NO: 849 - DNA, 1176 bp, Homo Sapiens
atggcagacattgacaacaaagaacagtctgaacttgatcaagatttggatgatgttgaagaagtagaagaagaggaaactggtgaagaaacaaaactcaaagcacgtcagctaactgttcagatgatgcaaaatcctcagattcttgcagcccttcaagaaagacttgatggtctggtagaaacaccaacaggatacattgaaagcctgcctagggtagttaaaagacgagtgaatgctctcaaaaacctgcaagttaaatgtgcacagatagaagccaaattctatgaggaagttcacgatcttgaaaggaagtatgctgttctctatcagcctctatttgataagcgatttgaaattattaatgcaatttatgaacctacggaagaagaatgtgaatggaaaccagatgaagaagatgagatttcggaggaattgaaagaaaaggccaagattgaagatgagaaaaaagatgaagaaaaagaagaccccaaaggaattcctgaattttggttaactgtttttaagaatgttgacttgctcagtgatatggttcaggaacacgatgaacctattctgaagcacttgaaagatattaaagtgaagttctcagatgctggccagcctatgagttttgtcttagaatttcactttgaacccaatgaatattttacaaatgaagtgctgacaaagacatacaggatgaggtcagaaccagatgattctgatcccttttcttttgatggaccagaaattatgggttgtacagggtgccagatagattggaaaaaaggaaagaatgtcactttgaaaactattaagaagaagcagaaacacaagggacgtgggacagttcgtactgtgactaaaacagtttccaatgactctttctttaacttttttgcccctcctgaagttcctgagagtggagatctggatgatgatgctgaagctatccttgctgcagacttcgaaattggtcactttttacgtgagcgtataatcccaagatcagtgttatattttactggagaagctattgaagatgatgatgatgattatgatgaagaaggtgaagaagcggatgaggaaggggaagaagaaggagatgaggaaaatgatccagactatgacccaaagaaggatcaaaacccagcagagtgcaagcagcagtga

SEQ ID NO: 850 - DNA, 1113 bp, Homo Sapiens
atgtcgcacccgtccccccaagccaagccctccaaccccagtaaccctcgagtcttctttgacgtggacatcggaggggagcgagttggtcgaattgtcttagaattgtttgcagatatcgtacccaaaactgcggaaaattttcgtgcactgtgtacaggagaaaaaggcattggacacacgactgggaaacctctccatttcaaaggatgcccttttcatcgaattattaagaaatttatgattcagggtggagacttctcaaatcagaatgggacaggtggagaaagtatttatggtgaaaaatttgaagatgaaaatttccattacaagcatgatcgggagggtttactgagcatggcaaatgcaggccgcaacacaaacggttctcagttttttatcacaacagttccaactcctcatttggatgggaaacatgtggtgtttggccaagtaattaaaggaataggagtggcaaggatattggaaaatgtggaagtgaaaggtgaaaaacctgctaaattgtgcgttattgcagaatgtggagaattgaaggaaggagatgacgggggaatattcccaaaagatggctctggcgacagtcatccagatttccctgaggatgcggatatagatttaaaagatgtagataaaattttattaataacagaagacttaaaaaacattggaaatacttttttcaaatcccagaactgggagatggctattaaaaaatatgcagaagttttaagatacgtggacagttcaaaggctgttattgagacagcagatagagccaagctgcaacctatagctttaagctgtgtactgaatattggtgcttgtaaactgaagatgtcaaattggcagggagcaattgacagttgtttagaggctcttgaactagacccatcaaataccaaagcattgtaccgcagagctcaaggatggcaaggattaaaagaatatgatcaagcattggctgatcttaagaaagctcaggggatagcaccagaagataaagctatccaggcagaattgctgaaagtcaaacaaaagataaaggcacagaaagataaagagaaggcagtatatgcaaaaatgtttgcttag

SEQ ID NO: 851 - DNA, 1173 bp, Homo Sapiens
atgacccatgctctggagtggcccagcctaactgcccagtggcttccagatgtaaccagaccagaagggaaagatttcagcattcatcgacttgtcctggggacacacacatcggatgaacaaaaccatcttgttatagccagtgtgcagctccctaatgatgatgctcagtttgatgcgtcacactacgacagtgagaaaggagaatttggaggttttggttcagttagtggaaaaattgaaatagaaatcaagatcaaccatgaaggagaagtaaacagggcccgttatatgccccagaacccttgtatcatcgcaacaaagactccttccagtgatgttcttgtttttgactatacaaaacatccttctaaaccagatccttctggagagtgcaacccagacttgcgtctccgtggacatcagaaggaaggctatgggctttcttggaacccaaatctcagtgggcacttacttagtgcttcagatgaccataccatctgcctgtgggacatcagtgccgttccaaaggagggaaaagtggtagatgcgaagaccatctttacagggcatacggcagtagtagaagatgtttcctggcatctactccatgagtctctgtttgggtcagttgctgatgatcagaaacttatgatttgggatactcgttcaaacaatacttccaaaccaagccactcagttgatgctcacactgctgaagtgaactgcctttctttcaatccttatagtgagttcattcttgccacaggatcagctgacaagactgttgccttgtgggatctgagaaatctgaaacttaagttgcattcctttgagtcacataaggatgaaatattccaggttcagtggtcacctcacaatgagactattttagcttccagtggtactgatcgcagactgaatgtctgggatttaagtaaaattggagaggaacaatccccagaagatgcagaagacgggccaccagagttgttgtttattcatggtggtcatactgccaagatatctgatttctcctggaatcccaatgaaccttgggtgatttgttctgtatcagaagacaatatcatgcaagtgtggcaaatggcagagaacatttataatgatgaagaccctgaaggaagcgtggatccagaaggacaagggtcctag

SEQ ID NO: 852 - DNA, 3942 bp, Homo Sapiens
atgcgctcagcggccgcagctcctcggagtcccgcggtggccaccgagtctcgccgcttcgccgcagccaggtggcccgggtggcgctcgctccagcggccggcgcggcggagcgggcggggcggcggtggcgcggccccgggaccgtatccctccgccgcccctcccccgcccggccccggcccccctccctcccggcagagctcgcctccctccgcctcagactgttttggtagcaacggcaacggcggcggcgcgtttcggcccggctcccggcggctccttggtctcggcgggcctccccgccccttcgtcgtcctccttctccccctcgccagcccgggcgcccctccggccgcgccaacccgcgcctccccgctcggcgcccgcgcgtccccgccgcgttccggcgtctccttggcgcgcccggctcccggctgtccccgcccggcgtgcgagccggtgtatgggcccctcaccatgtcgctgaagccccagcagcagcagcagcagcagcagcagcagcagcagcagcaacagcagcagcagcagcagcagcagcagccgccgcccgcggctgccaatgtccgcaagcccggcggcagcggccttctagcgtcgcccgccgccgcgccttcgccgtcctcgtcctcggtctcctcgtcctcggccacggctccctcctcggtggtcgcggcgacctccggcggcgggaggcccggcctgggcagaggtcgaaacagtaacaaaggactgcctcagtctacgatttcttttgatggaatctatgcaaatatgaggatggttcatatacttacatcagttgttggctccaaatgtgaagtacaagtgaaaaatggaggtatatatgaaggagtttttaaaacttacagtccgaagtgtgatttggtacttgatgccgcacatgagaaaagtacagaatccagttcggggccgaaacgtgaagaaataatggagagtattttgttcaaatgttcagactttgttgtggtacagtttaaagatatggactccagttatgcaaaaagagatgcttttactgactctgctatcagtgctaaagtgaatggcgaacacaaagagaaggacctggagccctgggatgcaggtgaactcacagccaatgaggaacttgaggctttggaaaatgacgtatctaatggatgggatcccaatgatatgtttcgatataatgaagaaaattatggtgtagtgtctacgtatgatagcagtttatcttcgtatacagtgcccttagaaagagataactcagaagaatttttaaaacgggaagcaagggcaaaccagttagcagaagaaattgagtcaagtgcccagtacaaagctcgagtggccctggaaaatgatgataggagtgaggaagaaaaatacacagcagttcagagaaattccagtgaacgtgaggggcacagcataaacactagggaaaataaatatattcctcctggacaaagaaatagagaagtcatatcctggggaagtgggagacagaattcaccgcgtatgggccagcctggatcgggctccatgccatcaagatccacttctcacacttcagatttcaacccgaattctggttcagaccaaagagtagttaatggaggtgttccctggccatcgccttgcccatctccttcctctcgcccaccttctcgctaccagtcaggtcccaactctcttccacctcgggcagccacccctacacggccgccctccaggcccccctcgcggccatccagacccccgtctcacccctctgctcatggttctccagctcctgtctctactatgcctaaacgcatgtcttcagaagggcctccaaggatgtccccaaaggcccagcgacatcctcgaaatcacagagtttctgctgggaggggttccatatccagtggcctagaatttgtatcccacaacccacccagtgaagcagctactcctccagtagcaaggaccagtccctcggggggaacgtggtcatcagtggtcagtggggttccaagattatcccctaaaactcatagacccaggtctcccagacagaacagtattggaaatacccccagtgggccagttcttgcttctccccaagctggtattattccaactgaagctgttgccatgcctattccagctgcatctcctacgcctgctagtcctgcatcgaacagagctgttaccccttctagtgaggctaaagattccaggcttcaagatcagaggcagaactctcctgcagggaataaagaaaatattaaacccaatgaaacatcacctagcttctcaaaagctgaaaacaaaggtatatcaccagttgtttctgaacatagaaaacagattgatgatttaaagaaatttaagaatgattttaggttacagccaagttctacttctgaatctatggatcaactactaaacaaaaatagagagggagaaaaatcaagagatttgatcaaagacaaaattgaaccaagtgctaaggattctttcattgaaaatagcagcagcaactgtaccagtggcagcagcaagccgaatagccccagcatttccccttcaatacttagtaacacggagcacaagaggggacctgaggtcacttcccaaggggttcagacttccagcccagcatgtaaacaagagaaagacgataaggaagagaagaaagacgcagctgagcaagttaggaaatcaacattgaatcccaatgcaaaggagttcaacccacgttccttctctcagccaaagccttctactaccccaacttcacctcggcctcaagcacaacctagcccatctatggtgggtcatcaacagccaactccagtttatactcagcctgtttgttttgcaccaaatatgatgtatccagtcccagtgagcccaggcgtgcaacctttatacccaatacctatgacgcccatgccagtgaatcaagccaagacatatagagcagtaccaaatatgccccaacagcggcaagaccagcatcatcagagtgccatgatgcacccagcgtcagcagcgggcccaccgattgcagccaccccaccagcttactccacgcaatatgttgcctacagtcctcagcagttcccaaatcagccccttgttcagcatgtgccacattatcagtctcagcatcctcatgtctatagtcctgtaatacagggtaatgctagaatgatggcaccaccaacacacgcccagcctggtttagtatcttcttcagcaactcagtacggggctcatgagcagacgcatgcgatgtatgcatgtcccaaattaccatacaacaaggagacaagcccttctttctactttgccatttccacgggctcccttgctcagcagtatgcgcaccctaacgctaccctgcacccacatactccacaccctcagccttcagctacccccactggacagcagcaaagccaacatggtggaagtcatcctgcacccagtcctgttcagcaccatcagcaccaggccgcccaggctctccatctggccagtccacagcagcagtcagccatttaccacgcggggcttgcgccaactccaccctccatgacacctgcctccaacacgcagtcgccacagaatagtttcccagcagcacaacagactgtctttacgatccatccttctcacgttcagccggcgtataccaacccaccccacatggcccacgtacctcaggctcatgtacagtcaggaatggttccttctcatccaactgcccatgcgccaatgatgctaatgacgacacagccacccggcggtccccaggccgccctcgctcaaagtgcactacagcccattccagtctcgacaacagcgcatttcccctatatgacgcacccttcagtacaagcccaccaccaacagcagttgtaa

SEQ ID NO: 853 - DNA, 1452 bp, Homo Sapiens
atggccgcggacgaagttgccggaggggcgcgcaaagccacgaaaagcaaactttttgagtttctggtccatggggtgcgccccgggatgccgtctggagcccggatgccccaccagggggcgcccatgggccccccgggctccccgtacatgggcagccccgccgtgcgacccggcctggcccccgcgggcatggagcccgcccgcaagcgagcagcgcccccgcccgggcagagccaggcacagagccagggccagccggtgcccaccgcccccgcgcggagccgcagtgccaagaggaggaagatggctgacaaaatcctccctcaaaggattcgggagctggtccccgagtcccaggcttacatggacctcttggcatttgagaggaaactggatcaaaccatcatgcggaagcgggtggacatccaggaggctctgaagaggcccatgaagcaaaagcggaagctgcgactctatatctccaacacttttaaccctgcgaagcctgatgctgaggattccgacggcagcattgcctcctgggagctacgggtggaggggaagctcctggatgatcccagcaaacagaagcggaagttctcttctttcttcaagagtttggtcatcgagctggacaaagatctttatggccctgacaaccacctcgttgagtggcatcggacacccacgacccaggagacggacggcttccaggtgaaacggcctggggacctgagtgtgcgctgcacgctgctcctcatgctggactaccagcctccccagttcaaactggatccccgcctagcccggctgctggggctgcacacacagagccgctcagccattgtccaggccctgtggcagtatgtgaagaccaacaggctgcaggactcccatgacaaggaatacatcaatggggacaagtatttccagcagatttttgattgtccccggctgaagttttctgagattccccagcgcctcacagccctgctattgccccctgacccaattgtcatcaaccatgtcatcagcgtggacccttcagaccagaagaagacggcgtgctatgacattgacgtggaggtggaggagccattaaaggggcagatgagcagcttcctcctatccacggccaaccagcaggagatcagtgctctggacagtaagatccatgagacgattgagtccataaaccagctcaagatccagagggacttcatgctaagcttctccagagaccccaaaggctatgtccaagacctgctccgctcccagagccgggacctcaaggtgatgacagatgtagccggcaaccctgaagaggagcgccgggctgagttctaccaccagccctggtcccaggaggccgtcagtcgctacttctactgcaagatccagcagcgcaggcaggagctggagcagtcgctggttgtgcgcaacacctag

SEQ ID NO: 854 - DNA, 2247 bp, Homo Sapiens
atggggcgggccggggctgccgccgtgatcccgggcctggccctgctctgggcagtggggctggggagtgccgcccccagccccccacgccttcggctctccttccaagagctccaggcctggcatggtctccagactttcagcctggagcgaacctgctgctaccaggccttgctggtggatgaggagcgtggacgcctgtttgtgggtgccgagaaccatgtggcctccctcaacctggacaacatcagcaagcgggccaagaagctggcctggccggcccctgtggaatggcgagaggagtgcaactgggcagggaaggacattggtactgagtgcatgaacttcgtgaagttgctgcatgcctacaaccgcacccatttgctggcctgtggcacgggagccttccacccaacctgtgcctttgtggaagtgggccaccgggcagaggagcccgtcctccggctggacccaggaaggatagaggatggcaaggggaagagtccttatgaccccaggcatcgggctgcctccgtgctggtgggggaggagctatactcaggggtggcagcagacctcatgggacgagactttaccatctttcgcagcctagggcaacgtccaagtctccgaacagagccacacgactcccgctggctcaatgagcccaagtttgtcaaggtattttggatcccggagagcgagaacccagacgacgacaaaatctacttcttctttcgtgagacggcggtagaggcggcgccggcactgggacgcctgtccgtgtcccgcgttggccagatctgccggaacgacgtgggcggccagcgcagcctggtcaacaagtggacgacgttcctgaaggcgcggctggtgtgctcggtgcccggcgtcgagggcgacacccacttcgatcagctccaggatgtgtttctgttgtcctcgcgggaccaccggaccccgctgctctatgccgtcttctccacgtccagcatcttccagggctctgcggtgtgcgtgtacagcatgaacgacgtgcgccgggccttcttgggaccctttgcacacaaggaggggcccatgcaccagtgggtgtcataccagggtcgcgtcccctacccgcggccaggcatgtgccccagcaagacctttggcaccttcagttccaccaaggacttcccagacgatgtcatccagtttgcgcggaaccaccccctcatgtacaactctgtcctgcccactggggggcgccctcttttcctacaagttggagccaattacaccttcactcaaattgccgcggaccgggttgcagccgctgacggacactatgacgtcctcttcattggcacagacgttggcacggtgctgaaggtgatctcggtccccaagggcagtaggcccagcgcagaggggctgctcctggaggagctgcacgtgtttgaggactcggccgctgtcaccagcatgcaaatttcttccaagaggcaccagctgtacgtagcctcgcggagcgcggtggcccagatcgcgttgcaccgctgcgctgcccacggccgcgtctgcaccgaatgctgtctggcgcgtgacccctactgcgcctgggacggggtcgcgtgcacgcgcttccagcccagtgccaagaggcggttccggcggcaagacgtaaggaatggcgaccccagcacgttgtgctccggagactcgtctcgtcccgcgctgctggaacacaaggtgttcggcgtggagggcagcagcgcctttctggagtgtgagccccgctcgctgcaggcgcgcgtggagtggactttccagcgcgcaggggtgacagcccacacccaggtgctggcagaggagcgcaccgagcgcaccgcccggggactactgctgcgcaggctgcggcgccgggactcgggcgtgtacttgtgcgccgccgtcgagcagggctttacgcaaccgctgcgtcgcctgtcgctgcacgtgttgagtgctacgcaggccgaacgactggcgcgggccgaggaggctgcgcccgccgcgccgccgggccccaaactctggtaccgggactttctgcagctggtggagccgggcggaggtggcagcgcgaactccctgcgcatgtgccgcccgcagcctgcgctgcagtcactgcccctggagtcgcggagaaagggccgtaaccggaggacccacgcccctgagcctcgcgctgagcgggggccgcgcagcgcaacgcactggtga

SEQ ID NO: 855 - DNA, 4389 bp, Homo Sapiens
atggccctctattatgaccaccagatagaagccccggatgcagcagggtcaccctcatttatcagctggcaccctgtccatccattcttggcagttgcttacatcagcacaacctcaacaggcagcgtggatatttacctggagcaaggggagtgcgtgccagatacacacgtcgagaggccgttccgggttgcttccctgtgctggcacccgacgcggctggtgctggctgtgggctgggagactggagaagtgacggtgtttaacaagcaggacaaggagcagcacacgatgcccctgacacacacagccgacatcaccgtgctccgttggagccccagtggaaactgcctgctgtctggggacaggcttggtgtcttgctcttgtggaggttggaccaaaggggccgagtgcaagggacgcctctgctgaaacacgagtatgggaaacacctcacgcactgcatcttccggctcccccctcctggcgaggacctggttcagttggcaaaggcagctgtgagcggtgatgagaaagccctggacatgtttaactggaagaagagcagttctggaagtttgctgaagatggggtctcacgaggggctgttgttctttgtcagtctgatggacgggacagtgcactatgtggatgagaagggcaagaccactcaggtggtgtccgcagacagcacgattcagatgctgttctacatggagaagagggaggcactggtggtggtcacagagaacctccggctgtccctgtacacggtgcctcctgagggcaaagcagaagaagtgatgaaggtcaagctgagcgggaaaaccggccgccgggcagacatcgctttgattgaaggcagccttctcgtgatggccgtcggggaggctgccctcagattctgggacatagaacgaggagagaattatatactgagtccagatgagaagtttggctttgagaaaggagagaatatgaactgtgtgtgttactgtaaagtcaaaggtcttctggccgctggtaccgacagagggcgagtagccatgtggaggaaagtaccagacttcctgggcagccccggggcagagggcaaggacaggtgggcccttcagacccctaccgagctccaaggaaacatcacgcaaatccagtggggttccaggaagaacctgctggcagtgaacagcgtcatctccgtggccatcctcagcgagcgggccatgtcgtcacacttccaccagcaagtggccgccatgcaggtctccccgagtctgctgaatgtgtgcttcctgtccacgggggtcgcacacagcctgcgcaccgacatgcacatcagtggagtgtttgccaccaaggatgctgtcgcagtctggaacggaaggcaggtggcgatcttcgagctttctggagccgcgatacggagtgcagggaccttcttgtgtgagacgcctgtgttagcaatgcatgaagaaaacgtttacacggtggagtcaaaccgagttcaagttcgaacctggcaggggactgtcaaacaactcctccttttctcggagactgaggggaatccctgcttcttggacatctgtgggaatttcctggttgtagggacagacttggctcactttaaaagctttgatctttcccgaagagaggccaaagcacactgtagctgcaggagcctggcggagctggtccctggggtggggggcatcgcttctctgcggtgcagcagcagcgggagcaccatcagcatcctccccagcaaggctgacaacagccctgattccaaaatctgcttctacgatgttgaaatggacacagtgaccgtctttgacttcaagactggacaaattgatcggagagagacgctgtcctttaatgagcaagagactaataagagccacctctttgtggatgagggactgaaaaattatgttcccgtgaaccacttctgggaccagagtgagccccggctgtttgtatgcgaagccgtgcaggagacgccgcgctcccagcctcagtctgcaaacgggcagccccaagatgggcgcgctggccctgcggcagatgttttgatcctgtccttcttcatttccgaagagcacggcttcctgcttcatgagagcttcccccggcctgccacctcccacagtctcctggggatggaagtgccttattactacttcacaagaaagcccgaagaagcagacagagaagacgaggtggagcctgggtgccaccacatccctcagatggtgtccaggagacccctgcgagactttgtggggctggaggactgcgacaaggccacccgggacgccatgctccacttcagcttctttgtcaccataggagacatggacgaagccttcaaatccatcaagctcatcaaaagtgaggccgtctgggagaacatggcgcgcatgtgcgtgaagacccagcggctggacgtggccaaggtgtgcctggggaacatgggccatgcccgcggggcccgagcgctgcgtgaggcggagcaggagccggagctagaggcccgcgtggccgtgctggccacgcagctgggcatgctggaggacgccgagcagctgtacaggaagtgcaagcgccacgacctcctgaacaagttctaccaggctgcgggccggtggcaggaggccctccaggtagccgagcaccacgatcgcgtgcacctgcgcagcacctaccaccgctatgccgggcacctggaggccagcgccgactgcagccgggccctcagttactacgagaagtcggacacgcaccgcttcgaggtgcccaggatgctgtcggaggacctgccgtccctggagctctacgtgaataaaatgaaggataagaccctgtggcggtggtgggcgcagtacctggagagccagggcgagatggacgccgcgctgcactactacgagctggcccgggaccacttctccctggtccgcatccactgcttccagggcaatgtccagaaggctgcgcaaatagccaacgagacaggaaacctggcggcctcctaccacctcgcccgccagtacgagagccaggaggaggtcgggcaggcggtgcacttctacacccgggcacaggccttcaagaatgccatccgcctgtgcaaggagaacggcctggacgaccagctcatgaacttggccctgctgagctcccccgaggacatgatcgaggcggcccgatactacgaggagaagggcgtgcagatggacagggcggtcatgctgtaccacaaggctggccacttctccaaggccctggagctggcctttgccacccagcagtttgtggccctacagctcatagcagaggacctggatgagacgtcagaccctgcgctcctggcccgctgctccgacttcttcatcgagcacagtcagtacgagagggcggtagagctgctgctggctgccaggaagtatcaggaagccctgcagctgtgcctggggcagaacatgagcatcaccgaggagatggcggaaaagatgaccgtggccaaggactcctcggacctgcctgaggagtcgcggcgggagctgctggagcagatagcagactgctgcatgcgccagggcagctaccacctggccaccaagaagtacacgcaggccggcaacaagctgaaggccatgagggcgctgctcaaatccggagacacggagaaaatcacgttcttcgcgagcgtgtccaggcagaaggaaatctacatcatggctgctaactacctgcagtccctggactggcggaaggagccggagatcatgaagaacatcatcggcttctacaccaaggggcgggccctggacctcctggctggcttttatgacgcttgtgcccaggtggagattgatgaataccagaactacgacaaagcccacggggcgctgaccgaggcctacaagtgcctggccaaggccaaggccaagagccccctggaccaggagaccaggctggcgcagctgcagagcaggatggcactggtgaagaggttcatccaggcccgcaggacgtacacagaggaccccaaggagtccatcaagcagtgtgagctgctcctggaggaaccagacctggacagcaccatccgcatcggggacgtctatggcttcctggtggagcactacgtgcggaaggaggaataccagacggcctacagattcctggaggagatgcggcggcggcttcccttggccaacatgtcctactacgtgagcccgcaggccgtggacgccgtgcaccgggggctgggtctcccactgccacgcaccgtccccgagcaggtccgccacaacagcatggaggacgccagggagctggacgaggaggtggtggaagaggcagatgacgacccctga

SEQ ID NO: 856 - DNA, 972 bp, Homo Sapiens
atggcgccgaagcaggacccgaagcctaaattccaggagggtgagcgagtgctgtgctttcatgggcctcttctttatgaagcaaagtgtgtaaaggttgccataaaggacaaacaagtgaaatacttcatacattacagtggttggaataaaaattgggatgaatgggttccggagagcagagtactcaaatacgtggacaccaatttgcagaaacagcgagaacttcaaaaagccaatcaggagcagtatgcagaggggaagatgagaggggctgccccaggaaagaagacatctggtctgcaacagaaaaatgttgaagtgaaaacgaaaaagaacaaacagaaaacacctggaaatggagatggtggcagtaccagtgagacccctcagcctcctcggaagaaaagggcccgggtagatcctactgttgaaaatgaggaaacattcatgaacagagttgaagttaaagtaaagattcctgaagagctaaaaccgtggcttgttgatgactgggacttaattaccaggcaaaaacagctcttttatcttcctgccaagaagaatgtggattccattcttgaggattatgcaaattacaagaaatctcgtggaaacacagataataaggagtatgcggttaatgaagttgtggcagggataaaagaatacttcaacgtaatgttgggtacccagctactctataaatttgagagaccacagtatgctgaaattcttgcagatcatcccgatgcacccatgtcccaggtgtatggagcgccacatctcctgagattatttgtacgaattggagcaatgttggcttatacacctctggatgagaagagccttgctttattactcaattatcttcacgatttcctaaagtacctggcaaagaattctgcaactttgttcagtgccagcgattatgaagtggctcctcctgagtaccatcggaaagctgtgtga

SEQ ID NO: 857 - DNA, 1086 bp, Homo Sapiens
atgtttgccaaaggcaaaggctcggcggtgccctcggatgggcaggctcgggaaaagttagctttatacgtctacgaatatttactgcacgtaggagcacagaaatctgcacagaccttcttatcggagattcgatgggaaaaaaacatcacgttgggagaaccgcctgggtttttgcactcgtggtggtgtgtattttgggacctttactgtgcagctcctgaaaggagagacacttgtgaacattcaagtgaagcaaaagcctttcatgattatagtgcagcagctgccccgagccccgtgcttggcaacattccccccaacgatgggatgccgggaggccccatcccgccaggtttctttcagccttttatgtcaccgcgatacgcaggcggccccaggcccccgatcagaatgggaaaccagcctccgggaggagttcctgggacacagccattgctgcccaattctatggatcccacacgacaacaaggccaccccaacatgggaggatcaatgcagagaatgaaccctccccgaggcatggggcccatgggtcccggcccacagaattacggcagcggcatgagaccaccacccaactccctcggccccgccatgcccgggattaacatgggcccgggagctggcagaccctggcccaatcctaacagtgctaactcaattccatactcctcctcatcacctggtacctatgtgggaccccctggtggtggcggtcctccaggaacacccattatgcccagtcccgcagattcaacaaattccagtgacaacatctacacaatgattaatccagtgccgcctggaggcagccggtccaacttcccgatgggtcccggctcggacggtccgatgggcggcatgggtggcatggagccacaccacatgaatggatcattagggtcaggcgacatagacggacttccaaaaaattctcctaacaacataagtggcattagcaatcctccaggcacccctcgagatgacggcgagctaggagggaacttcctccactcctttcagaacgacaattattctccaagcatgacgatgagtgtgtga

SEQ ID NO: 858 - DNA, 1653 bp, Homo Sapiens
atgtcgacctcgtccttgaggcgccagatgaagaacatcgtccacaactactcagaggcggagatcaaggttcgagaggccacgagcaatgacccctggggcccatccagctccctcatgtcagagattgccgacctcacctacaacgttgtcgccttctcggagatcatgagcatgatctggaagcggctcaatgaccatggcaagaactggcgtcacgtttacaaggccatgacgctgatggagtacctcatcaagaccggctcggagcgcgtgtcgcagcagtgcaaggagaacatgtacgccgtgcagacgctgaaggacttccagtacgtggaccgcgacggcaaggaccagggcgtgaacgtgcgtgagaaagctaagcagctggtggccctgctgcgcgacgaggaccggctgcgggaagagcgggcgcacgcgctcaagaccaaggaaaagctggcacagaccgccacggcctcatcagcagctgtgggctcaggcccccctcccgaggcggagcaggcgtggccgcagagcagcggggaggaggagctgcagctccagctggccctggccatgagcaaggaggaggccgaccaggaggagcggatccgtcgcggggatgacctgcggctgcagatggcaatcgaggagagcaagagggagactgggggcaaggaggagtcgtccctcatggaccttgctgacgtcttcacggccccagctcctgccccgaccacagacccctgggggggcccagcacccatggctgctgccgtccccacggctgcccccacctcggacccctggggcggcccccctgtccctccagctgctgatccctggggaggtccagcccccacgccggcctctggggacccctggaggcctgctgcccctgcaggaccctcagttgacccttggggtgggaccccagcccctgcagctggggaggggcccacgcctgatccatggggaagttccgatggtggggtcccggtcagtgggccctcagcctccgatccctggacaccggccccggccttctcagatccctggggagggtcacctgccaagcccagcaccaatggcacaacagccgggggattcgacacggagcccgacgagttctctgactttgaccgactccgcacggcactgccgacctccgggagcagcgcaggagagctggagctgctggcaggagaggtgccggcccgaagccctggggcgtttgacatgagtggggtcaggggatctctggctgaggctgtgggcagccccccacctgcagccacaccaactcccacgccccccacccggaagacgccggagtcattcctggggcccaatgcagccctcgtcgacctggactcgctggtgagccggccgggccccacgccgcctggagccaaggcctccaaccccttcctgccaggcggaggcccagccactggcccttccgtcaccaaccccttccagcccgcgcctcccgcgacgctcaccctgaaccagctccgtctcagtcctgtgcctcccgtccctggagcgccacccacgtacatctctccccttggcgggggccctggcctgccccccatgatgcccccgggccccccggcccccaacactaatcccttcctcctataa

SEQ ID NO: 859 - DNA, 1092 bp, Homo Sapiens
atggccgcagcggcgatggcggcagcggcaggtggaggggctggcgcggcccgctccctctcgcgcttccgaggctgcctggctggcgcgctgctcggggactgcgtgggctccttctacgaggcccacgacaccgtcgacctgacgtcagtcctgcgtcatgtccagagtctggagccggaccccggcacgcccgggagtgagcggacagaagccttgtactacacagatgacacagccatggccagggccctggtgcagtccctgctagccaaggaggcctttgacgaggtggacatggctcacagatttgctcaggagtacaagaaagaccctgacaggggctatggtgctggagtagtcactgtcttcaagaagctcctgaaccccaaatgtcgcgatgtctttgagcctgcccgggcccagtttaacgggaaaggctcctatggcaatggaggtgccatgcgggtggctggcatctccctggcctatagcagtgtccaggatgtgcagaagtttgcccggctctcggcccagctgacacacgcctcctccctgggttacaatggcgccatcctgcaggccctggctgtgcacctggccttgcagggcgagtcttccagcgagcactttctcaagcaactcctgggccacatggaggatctggagggtgatgcccagtccgtcttggatgccagggagttgggcatggaggagcgtccatactccagccgcctgaagaagattggagagcttctagaccaggcatcggtgaccagggaggaagtggtgtctgagctagggaatggcattgctgcctttgagtcggtacccaccgccatctactgcttcctacgctgcatggagccagaccctgagatcccttctgccttcaatagcctccaaaggactctcatttattccatctcacttggtggggacacagacaccattgccaccatggctggggccattgctggtgcctactatgggatggatcaggtgccagagagctggcagcaaagctgtgaaggctacgaggagacagacatcctggcccaaagcctgcaccgtgtcttccagaagagttga

SEQ ID NO: 860 - DNA, 3192 bp, Homo Sapiens
atgcctcatttgcctctcgcctcttttcgaccaccattttgggggctgaggcactcacggggcctccccaggtttcactccgtttctacacagtcggagccccatggatctcccatctcccggaggaaccgtgaagccaaacagaagcgcctgcgagagaagcaggcgactctggaggctgagatagcaggggagagcaagtcacctgcagaatccattaaggcctggaggcctaaggagttagtattgtatgaaatccctacgaaacccggtgaaaagaaagatgtctctgggcccctgcctcctgcatacagcccccgatatgttgaggctgcctggtacccgtggtgggtacgagagggcttcttcaaaccagaatatcaggcccggctgccccaagctacaggggagaccttttccatgtgtatcccacctcccaatgtcactggctccctgcacattggccacgcactcacggtggccatacaggatgccctcgtgcgctggcaccggatgcgtggggatcaagtgctgtgggtccctggttcagatcatgcaggaattgctacacaagctgtggtggagaaacaactgtggaaggaacggggagtgaggagacatgagctgagccgggaggccttccttagggaggtgtggcagtggaaggaggcgaaaggtggagagatctgtgagcagctgcgagctctgggtgcctccctggactgggatcgagagtgttttaccatggatgttggctcctcagtggctgtgactgaagcttttgtgcggctctacaaggcggggttgctgtaccggaaccatcagcttgtcaactggtcatgtgctttaagatcagccatctcggacattgaggtggagaaccggcccctgcctggccacacacagcttcgactgcctggctgccccacccccgtgtcttttggcctcctattttctgttgccttccccgtggatggagagcctgatgcagaggttgtggtaggaaccacaaggccagagacgctgcctggagatgtggctgtggccgttcatccagacgactcgcgatacacacatctacacgggcgacagcttcgtcaccccttgatggggcagcctcttcccctcatcacagactatgctgttcagccacatgtgggcacgggggcagtgaaggtgactccagctcacagtcctgccgatgctgagatgggggcccgacatggcttgagccccttgaatgtcattgcggaggatgggaccatgacctccctctgcggggactggctgcagggtcttcaccggtttgtggcccgggaaaagataatgtctgtgctgagtgaatggggcctgttccggggcctccagaaccaccccatggtactgcccatctgcagccgttctggggatgtgatagaatacctgctgaagaaccagtggtttgtccgctgccaggaaatgggggcccgagctgccaaggctgtggagtcgggggccctggagctcagtccctccttccaccagaagaactggcagcactggttttcccatattggggactggtgtgtctcccggcagctgtggtggggccatcagattccagcctacctggttgtagaggaccatgcgcagggagaagaggactgttgggtggttgggcggtcagaggctgaggccagagaggtagcagcggaactgacagggaggccaggggcagagctgaccctggagagggatcctgatgtcctagacacatggttttcttctgccctgttccccttttctgccctgggctggccccaagagaccccagaccttgctcgtttctaccccctgtcacttttggaaacgggcagcgaccttctgctgttctgggtgggccgcatggtcatgttggggacccagctcacagggcagctgcccttcagcaaggtgcttcttcatcccatggttcgggacaggcagggccggaagatgagcaagtccctggggaatgtgctggacccaagagacatcatcagtggggtggagatgcaggtgctgcaggaaaagctgagaagcggaaatttggaccctgcagagctggccattgtggctgcagcacagaaaaaggactttcctcacgggatccctgagtgtgggacagatgccctgagattcacactctgctcccatggagttcaggcgggcgacttgcacctgtcagtctctgaggtccagagctgccgacatttctgcaacaagatctggaatgctcttcgctttatcctcaatgctttaggggagaaatttgtgccacagcctgctgaggagctgtctccctcctccccgatggatgcctggatcctgagccgccttgccctggctgcccaggagtgtgagcggggcttcctcacccgagagctctcgctcgtcactcatgccctgcaccacttctggcttcacaacctctgtgacgtctacctggaggctgtgaagcccgtgctgtggcactcgccccgccccctggggccccctcaggtcctgttctcctgcgctgacctcggcctccgcctcctggccccactgatgcccttcctggctgaagagctctggcagaggctgccccccaggcctggttgcccccctgcccccagcatctcggttgccccctaccccagcgcctgcagcttggagcactggcgccagccagagctggagcggcgcttctcccgggtccaagaggtcgtgcaggtgctaagggctctccgagccacgtaccagctcaccaaagcccggccccgagtgctgctgcagagctcagagcctggggaccagggcctcttcgaggccttcttggagcccctgggcaccctgggctactgtggggctgtgggcctgttacccccaggcgcagcagctccctccggctgggcccaggctccactcagtgacacggctcaagtctacatggagctgcagggcctggtggacccgcagatccagctacctctgttagccgcccgaaggtacaagttgcagaagcagcttgacagcctcacagccaggaccccatcagaaggggaggcagggactcagaggcaacaaaagctttcttccctccagctggaattgtcaaaactggacaaggcagcctctcacctccggcagctgatggatgagcctccagccccagggagcccggagctctaa

SEQ ID NO: 861 - DNA, 1353 bp, Homo Sapiens
atgggggcgcccccgggctaccggccctcagcttgggtgcatctcctccaccagctgccccgcgccgacttccagctccgcccggtgcccagcgttttcgcgccccaagagcaggaataccagcaggccttgttgctggtggcggccttggcgggcctgggcttgggcctgagcctcattttcatcgctgtctacctcatccgcttctgctgctgccggccccccgagccccccgggtccaagatcccctcgcccgggggaggctgcgtcacctggagctgcattgtcgcccttctcgccggctgcactggcattggcatcggtttctatggcaacagtgagaccagtgatggggtgtcccagctcagctctgcgctgctgcacgccaaccacacactcagcaccattgaccacctggtgttggagacggtggagaggctgggcgaggcggtgaggacagagctgaccaccctggaggaggtgctcgagccgcgcacggagctggtggctgccgcccgaggggctcgacggcaggcggaggctgcggcccagcagctgcaggggctggccttctggcagggagtgcccctgagccccctgcaggtggctgaaaatgtgtcctttgtggaggagtacaggtggctggcctacgtcctcctgctgctcctggagctgctggtctgcctcttcaccctcctgggcctggcgaagcagagcaagtggctggtgatcgtgatgacagtcatgagtctcctggttctcgtcctgagctggggctccatgggcctggaggcagccacggccgtgggcctcagtgacttctgctccaatccagacccttatgttctgaacctgacccaggaggagacagggctcagctcagacatcctgagctattatctcctctgcaaccgggccgtctccaaccccttccaacagaggctgactctgtcccagcgagctctggccaacatccactcccagctgctgggcctggagcgagaagctgtgcctcagttcccttcagcgcagaagcctctgctgtccttggaggagactctgaatgtgacagaaggaaatttccaccagttggtggcactgctacactgccgcagcctgcacaaggactatggtgcagccctgcggggcctgtgcgaagacgccctggaaggcctgctcttcctgctactcttctccctgctgtctgcaggagcgctggccactgccctctgcagcctgccccgagcctgggccctcttcccacccagtgacgactacgatgacacagacgatgacgaccctttcaaccctcaggaatccaagcgctttgtgcagtggcagtcgtctatctga

SEQ ID NO: 862 - DNA, 14946 bp, Homo Sapiens
atggacttagcaccagacagggctactggccgcccgtggctcccgttgcacactctatcagtatctcagctccttcgagtgttttggctactgtcattgcttccggggcaggcctgggtccacggggccgagccgcgccaggtgttccaagtgctggaagagcaacctccaggcactctggtaggcaccatccagacgcgccccggcttcacctacaggctcagcgaaagccacgccctgtttgccataaacagtagcaccggagccctgtacaccacctccaccatcgaccgcgagagcctgcccagcgacgtgatcaacctggtggtcctttccagcgcgcccacctaccccaccgaagtgcgagtgctggtgcgggacctcaatgacaacgcccccgttttcccggacccctctatcgtggtcactttcaaggaagacagtagcagcggacgccaagtcatcttagacaccgccaccgactcggacatcggctcaaacggtgtggaccaccgctcctaccgcatcatccgcggcaatgaggcggggcgcttccgtctggacatcaccctgaacccgagcggcgagggagcgttcctgcatctggtgtccaagggcggactggaccgtgaggtcactccgcagtaccagctcctggttgaggtggaggacaagggtgagcctaagcggcggggctaccttcaggtaaacgtgactgtgcaagacattaatgacaaccccccggtttttggcagttctcactaccaggcgggggtgcctgaggacgcggttgtgggttccagcgtcctccaggtggcggcggcggacgcggacgagggcaccaacgcggacatccgctatcgcctgcaggacgaggggacccccttccaaatggaccctgagacgggacttatcacggtgcgggagcccctggacttcgaagctcggcgccaatactcgcttacggtgcaggcgatggacagaggcgtgccttccctcactgggcgcgccgaggcgctgattcagctgctggacgtgaatgacaatgacccggtagtgaagttccgctacttcccggccacctcgcgctacgcctcggtagatgagaatgctcaagtgggcaccgtggtggctctgctcaccgtgacggacgcagattctcccgcggccaacgggaacatctccgtgcaaattctcgggggcaatgagcagcgccactttgaagtgcaaagcagcaaagtgccgaacctgagcctaatcaaggtggccagcgccttggaccgcgagcgcatcccttcctacaacctcacagtttccgtctctgataactacggggcgccccctggcgcagcagtccaggcgcgctcttctgtggcaagcctggtgatttttgttaatgacatcaatgaccatcctcctgtcttttcacagcaagtgtacagagtgaacctgagcgaggaggcgcctccgggaagctatgtgagtgggatatctgccactgatggcgactctggtctcaatgctaatctgcgttacagcattgtctctggcaatggactgggatggttccatatcagtgaacatagcggcctcgtgaccactgggtcctctgggggcctggaccgtgaacttgcttcccagattgttctgaatataagtgcccgggaccagggagttcaccccaaggtgtcctatgcccagcttgtagtaactctcctagatgtgaatgatgaaaagccagtatttagccagccagaagggtatgatgtgtctgtggttgagaatgccccaacagggacagaactgttgatgctcagggcaactgacggggacctgggtgacaacggaacagtgcgcttctccttacaagaggcagagactgaccggaggtccttccgtctggatcctgtgtctgggaggttgagtactatttcctccttggacagagaagagcaagccttctactccctgttggttctggccacagatctgggctcccctccccagtcatcaatggctcgcataaatgtgagtcttctggatataaatgataacagccctgtcttctacccggtccaatactttgctcacattaaggagaatgagcctggaggtagctacatcaccactgtgtctgccactgacccagacttgggtaccaatggtactgtcaaatatagcatatctgctggggacaggtctcggtttcaggtcaatgctcagagtggggttatttctacaagaatggccctagacagagaagaaaaaacagcttatcagttgcaaatagtagctactgatggtggcaatttacaatctcccaaccaggcaatagtaaccatcactgtattggacactcaagacaacccacctgtattcagtcaggttgcctacagctttgtggtttttgagaacgtggcgctgggatatcatgtgggtagtgtgtctgcatccaccatggatctcaattccaacatcagttatctcattactactggggatcagaaaggtatgtttgctatcaaccaggtcactgggcagcttaccacagcaaatgtgattgatagagaagagcaatccttttatcagctgaaggtagtggccagtgggggcacagtgactggagacactatggttaacataacagttaaggatttgaatgacaactctccccatttccttcaggcaatagagagtgtaaatgtggtggagaattggcaggcaggtcacagcattttccaggccaaagctgtggaccctgatgaaggtgtcaatggcatggtactctatagtctgaagcaaaaccccaagaacctgtttgctatcaatgaaaagaatggcactattagtctgcttgggcccctggatgttcatgctggctcctaccaaatagagatcttggcatctgacatgggtgtcccacagctctcctctagtgtcatcttaacagtttatgtccatgatgtaaatgacaattcaccagtgtttgaccaactctcttatgaagtcaccctttctgagtcagaacctgtgaattctcgattctttaaagtacaagcttctgataaggattcaggagcaaatggtgaaattgcatacaccattgctgaaggaaatacaggggatgcttttggcatattcccagatggtcaattgtatataaaaagtgaactggaccgtgaacttcaagacagatatgttttaatggttgttgcttctgacagagcagtggaaccccttagtgctactgtgaatgttactgtaattttagaagatgtaaatgataacagacctctttttaacagtaccaattacacattttacttcgaagaagagcagagggctgggtcgtttgtgggcaaagtaagtgctgtagataaagactttgggccaaatggagaagtaaggtattcttttgaaatggtgcagccagattttgagttgcatgccatcagtggggaaattacaaatactcatcagtttgacagggagtctcttatgaggcggagagggactgctgtgtttagctttacagtcatagcaacagatcaggggatccctcagcctctcaaggatcaggccactgtacatgtttacatgaaggatataaatgataatgctcccaaatttttaaaagacttttaccaagctacaatatcagaatcagcagccaatctgacacaagtgttaagagtatctgcctcagatgttgatgaaggtaataatggacttattcactattctataataaaaggaaatgaagaaagacagtttgctatagacagtacctctggtcaggtaacactaattggcaaattagactatgaagcaacacctgcctattcccttgtaattcaagcagtggattcagggacaatccccctcaattcaacgtgtactttaaatattgatattttagatgaaaatgacaataccccttctttccctaaatcaacactctttgttgatgttttggaaaacatgagaattggtgaactcgtgtcctctgttactgcaactgattccgattcaggtgacaatgctgatttatattacagtattactgggactaacaaccacggaacttttagcattagcccaaacactgggagtatttttcttgccaaaaaactggactttgaaacacagtctttgtataaattaaatataacagcaaaagaccaaggaagacctcctcgttcatctacaatgtcagtggttattcacgtgagggactttaatgacaatcctcctagctttcctcctggagatattttcaagtctattgttgagaacattcccatcggtacatctgtcatttcagtgactgcacatgaccctgatgcagacattaatggtcaactatcctacacaatcattcaacagatgccaagaggcaaccactttaccatagatgaagtcaaagggactatatatactaatgctgaaatagatcgggaatttgctaatctctttgagttgactgtaaaagccaatgatcaagctgtgccaatagaaactagacggtatgctttgaagaacgtgaccattttggttacagacctcaatgacaatgtcccaatgtttatatcacaaaacgcccttgctgcagacccatcagctgtgattggttccgttctgacaacaattatggctgctgacccagatgaaggtgctaatggagaaatagagtatgagatcatcaatggggacacagacaccttcattgttgatcgttatagtggagacctgagagtggcttcagcgttggtgccttcacagttgatctacaatctcatagtttcagcaacagaccttgggcctgaaaggaggaaatcgaccactgaattgaccatcattcttcagggccttgatggacctgtttttactcaacccaaatatataactattttgaaggaaggagaacccattggcacaaacgtgatatcaatagaagcagctagccccagaggatctgaggccccagtggagtattatattgtttcagttcgttgtgaagaaaaaactgttggacgcctctttactattggacgacatactggtataattcagaccgcagccattctggaccgggagcaaggagcatgtctttacctggtggatgtttatgccatagaaaaatcaactgcttttcccagaacacagagagcagaggtagaaataacacttcaggatatcaatgacaatccaccagtatttccaacggacatgctggatctcacggtagaggagaacattggagatggctctaagattatgcagctgacagccatggatgctgatgagggtgcaaatgctctcgtcacatacactatcattagtggagctgatgatagttttcgcatcgacccagaatccggagatctgatagcaaccaggcggttggacagggaacgccgctccaaatattcactgctagttcgtgctgatgatggtcttcagtcctcggatatgagaattaatatcactgtcagtgatgtgaatgaccatacacccaaattttccagacccgtgtactcttttgacattcctgaggacacaatccctggttctttggtagcagccattttagccacggatgatgactctggtgtgaatggagaaattacatatattgtgaatgaagatgatgaagatggcatctttttcctgaatcctattactggggtctttaatttgactcgattattagattatgaagtacagcaatattatatcctcactgttcgagcagaagatggtgggggacaatttactaccatcagagtttatttcaatattctagatgtaaatgataatccacctattttcagcttgaattcatacagcacatctttaatggagaatctacctgtgggatctactgttcttgtgtttaatgttactgatgcagatgatggcatcaactctcaattgacttatagcattgcttcaggtgatagccttgggcagtttactgttgacaagaatggtgtactcaaagtcctaaaagctttggatcgggaaagtcagtccttctacaacttggttgttcaagtgcatgacctgccacagattccagcctccagattcacaagcactgctcaagtctccattattttgttggatgtaaatgataacccaccgacatttctttcccctaaattgacatacattccagaaaatacacctattgatactgttgttttcaaagctcaagcaactgacccagatagtggcccaaacagctatattgagtacactctgctgaaccctttgggaaacaagttcagtattgggaccattgatggtgaagtgaggctcactggagaactggacagagaagaagtttctaattatactctaacagtggtggctacagacaaaggtcaaccatctctctcttcatctacagaggttgtagttatggtacttgacatcaatgataacaaccccatctttgcacaagctttgtataaagtggagattaatgaaaacacacttactggaacagatataatacaagtgttcgcagcagatggagatgaaggcacaaatggacaggttcgctatggcattgttaatggtaataccaatcaggaatttcggatagactctgtcacaggtgccatcactgtcgctaaacctttggatagagaaaagacccctacctaccatttaactgttcaggcaacagatcgaggcagcacacccagaactgatacctccacggtcagcattgttctactggatattaatgactttgttcctgtatttgagctatctccatattctgtaaatgtccctgagaatttagggacactacccagaacaattcttcaggtggtggcaagagatgatgatcgaggatctaacagcaaactctcatatgttctgtttggtggtaatgaagacaatgcttttactctctcagccagtggagaacttggagtaacacagagtctggatcgggaaacaaaagagcgctttgtcttaatgattacagctacagattcaggatcccctgccttgactggaactggaacaatcaacgtcatagtagatgatgtcaatgacaatgtccccacatttgccagtaaagcgtatttcacaacaattcctgaggatgcaccaactggaacagatgttttattggtaaatgcctcagatgctgatgcttcaaagaatgcagttataaggatcatcggtggaaactctcagttcacgatcaacccatcgacaggacaaatcatcaccagcgcattgttagatagggaaacaaaagataattatactttggtagtggtctgcagtgatgcgggatccccagagcctctttccagttccaccagtgtgcttgtcactgtgactgatgtcaatgacaatccaccaagatttcagcatcacccatatgtcactcacatcccatctcctactcttccaggttcctttgtctttgcggttacagtcacagatgctgatattggaccaaattctgaactgcattattctctttcgggtagaaattctgaaaaatttcacattgacccactgaggggagccattatggccgccggaccactaaacggagcttcagaagtgacattttctgtgcatgtaaaagatggtggctcatttccaaagacagattctacaacagtgactgttagattcgtgaataaggccgatttccctaaagtgagagccaaagaacaaacgttcatgtttcctgaaaaccaaccagtcagctctcttgtcaccaccatcacaggatcctctttaagaggagaacctatgtcatattatatcgcaagtgggaatcttggcaatactttccagattgatcagttaacagggcaggtgtctattagtcaacctctggattttgaaaagatacaaaaatatgttgtatggatagaggccagagacggtggtttccctcctttctcctcttacgagaaacttgatataacagtattagatgtcaatgataatgccccaatttttaaggaagacccatttatatctgaaatattggaaaacctttcccctcgaaaaatacttactgtttcggcaatggacaaggacagtggacccaatggacagttagattatgaaattgttaatggcaacatggaaaatagtttcagtatcaatcatgctactggtgaaattagaagcgttagacctttggacagggaaaaagtatctcattatgtcctaaccataaaatcatcagacaaagggtccccgtctcagagtacttcagtaaaagtcatgattaacattttagatgaaaatgataatgcccctaggttttctcagatatttagtgcccatgttcctgaaaattcccccttaggatacacagttacccgtgtcacaacttctgatgaagacattgggatcaatgcaattagtagatattctataatggatgcaagtcttccatttacaattaatcccagcacaggggatattgtcataagcagacctttaaatagggaagatacagaccgttacagaattcgagtttccgcacatgattctgggtggactgtaagtacagatgtcacaatatttgtgacagacatcaatgacaatgctccaagatttagcagaacttcctattatttagattgccctgaacttactgagattggctccaaagtaactcaggtatttgcaacagatcctgatgagggatcaaatggacaagtgttttatttcataaaatcccaatcagaatatttcaggattaatgccaccactggagagattttcaataaacagatcttaaaataccaaaatgtcactggcttcagtaatgtgaatatcaacaggcatagttttatagtgacatcttcagatcgaggtaaaccttccttaattagtgagacaacagttaccatcaatatagtggacagtaatgacaatgcacctcaatttcttaaaagtaaatatttcactccagtcaccaaaaatgttaaggttggtacgaagttaatcagagttacagcaatagatgacaaagattttggactgaattcagaagtggagtatttcatttctaatgataaccatttaggaaaatttaagttggacaatgatacggggtggatttcagtagcatcctccctgatttctgacttgaaccaaaacttttttatcacagtcactgcaaaggataagggaaaccctccactttcttcccaagcaactgttcacataactgtcactgaggaaaactaccatacacctgaattctctcaaagccacatgagtgcaaccatccctgagagccatagcattgggtccattgtcagaactgtttctgcaagagatagagatgcagcgatgaatggcttgattaagtacagcatttcttcaggaaatgaagaaggcatttttgcaatcaattcttctacaggtatattaacactagccaaagctcttgattatgagctatgccagaaacacgaaatgacgattagtgctatagatggaggatgggttgcaagaactggttactgcagtgtgaccgtaaatgtgattgatgtgaatgataattctccagtattcctctctgatgactatttccctactgttttggaaaatgccccaagtggaacaacagttatccacctaaatgcaacagatgctgactctggaacaaatgctgtgattgcgtatactgtacagtcatctgacagtgacctctttgtcattgaccctaacacaggagtcataaccactcaaggcttcttggattttgaaaccaagcagagctaccatcttactgtgaaagccttcaatgtccccgatgaggaaaggtgtagctttgccactgttaatatacaattaaaagggacaaatgaatatgtgccccgttttgtttccaaactttactattttgaaatctcagaagcagctcctaaaggtactattgttggagaagtgtttgctagcgaccgtgatttgggcactgatggggaggtacactatttgatttttggtaatagtcgaaagaagggtttccagatcaataagaagactggacagatttatgtttctggaattcttgatcgagaaaaagaagaaagggtgtctttgaaggtattggccaagaactttggcagcattagaggtgcagatatagatgaggtcactgtaaatgtcaccgtgcttgatgcaaatgacccacccatttttactctaaacatctacagtgtgcagatcagtgaaggggtcccaataggaactcatgtgacctttgtcagtgcctttgactcagactccatccccagctggagcaggttttcttacttcatcggatcagggaatgaaaatggtgccttttctattaatccgcagacaggacagatcaccgttactgcagaattagatcgagaaacccttcccatctataatctctcagttttggctgttgattcagggaccccctcagctacaggtagtgcctctttattagtcaccctggaagatataaatgataacgggcccatgctgactgtcagtgaaggagaagtcatggaaaacaaacggccaggcactttggtgatgacccttcagtccactgaccctgatctccctccaaatcaaggtccctttacttattacttgctgagcacaggtcctgccaccagttatttcagtctgagcactgctggagttctgagcacaaccagagagattgacagagagcagattgcagacttctatctgtctgtggttaccaaggattctggtgttcctcaaatgtcttccacaggaactgtgcatatcacagttatagaccaaaatgacaatccttcacagtctcggacggtggagatatttgttaattattatggtaacttgtttcccggtgggattttaggctctgtgaagccacaggatccagatgtgttagacagcttccactgctcccttacttcaggagttaccagcctcttcagtattccagggggtacttgtgatctgaattcccagccaaggtccacagatggcacgtttgatctgactgtccttagcaatgatggagttcacagcacagtcacgagcaacatccgagttttctttgctggattttccaatgccacagtggataacagcatcttacttcgtctcggcgtaccaacagtaaaggacttcttgaccaaccactatcttcattttttacgcattgccagctcacagctgacaggcttagggactgctgtgcaactgtacagtgcatatgaagagaacaatagaacgtttcttttggcagctgtgaagcgaaatcataatcagtatgtgaatcccagtggcgtagccaccttctttgaaagcatcaaagagatccttctccggcagagtggagtaaaggtggaatctgtggatcatgactcctgtgtgcatggcccatgtcagaatggagggagctgtctacgaagattggctgtgagctccgtattaaaaagccgtgagagtcttccagtcatcatcgtggcaaatgaacctctgcagcctttcttatgcaagtgtctgccaggatatgcgggtagctggtgtgaaatagatatagatgaatgtcttccatcaccttgccacagtggtggaacctgtcacaatttagtgggaggattttcatgcagctgcccagatggcttcactggtagggcgtgtgagagagatatcaatgagtgcctgcagagtccttgcaagaatggtgccatctgccagaattttccaggaagcttcaactgtgtttgcaaaactggatacacagggaaaatgtgtgaatcttcagtcaattactgtgaatgcaacccctgctttaatggtggttcctgccaaagtggtgtggattcttattattgtcattgtccatttggtgtctttggaaaacactgcgagttgaacagttatggatttgaggagttatcatacatggaatttccaagcttggaccccaataacaactatatttatgtcaaatttgccacgattaaaagtcatgccttattgctttacaactatgacaaccagacaggcgaccgggctgagtttttggcccttgaaattgccgaagaaagactaagattctcttataatttaggcagtggtacatataagctcaccaccatgaagaaggtgtcagatggacattttcacactgtgattgccaggagagcaggaatggcagcctccttaactgtggactcctgttctgagaaccaagagccaggatattgtactgtcagtaatgtggcagtttcagatgactggactcttgatgttcagccaaatagagttacagttggaggtatcagatctctagaaccaatccttcagagaagaggacacgtggaaagccatgattttgttgggtgtataatggagtttgcagtcaatggaaggcctctggaacccagccaagctttggcagcacaaggcatcctagatcaatgccctaggctggaaggcgcttgtactcgcagcccatgccaacatggtggcacatgtatggattactggtcatggcagcagtgtcattgcaaagagggactcactgggaaatactgtgaaaaatctgttactcctgacactgccttatcattagaaggcaaagggcgcttggactaccacatgagtcagaatgagaagcgggaatatttgttaaggcaaagcttacgaggtgccatgttggagccttttggtgtgaacagtctggaagtaaaatttaggaccagaagcgagaatggcgttttaatccatatccaagaaagcagcaattacactactgtgaagattaagaatggcaaagtatattttacatccgatgcaggaattgctgggaaagtggagagaaatattcctgaagtatatgttgcagacggccactggcacacttttctaattgggaaaaatggaacagcaacagtattgtctgttgacagaatatataacagagatattatccaccctactcaggacttcggtggccttgatgtgcttactatatcacttggaggaattccacccaatcaagcacatcgagatgcccaaacagcaggttttgatggctgcattgcttctatgtggtatggtggagaaagtcttcctttcagcgggaagcatagcttggcctccatctcaaaaacagatccctcagtgaagattggctgccgtggcccgaacatttgtgccagcaacccctgctggggtgatttgctgtgcattaatcagtggtatgcctacaggtgtgtccctcctggggactgtgcctcccacccgtgccagaatggtggcagctgtgagccaggcctgcactccggcttcacctgtagctgcccagactcgcacacgggaaggacctgtgagatggtggtggcctgtcttggcgtcctctgtcctcaggggaaggtgtgcaaagctggaagtcctgcggggcatgtctgtgttctgagtcagggccctgaagagatctctctgcctttgtgggctgtgcctgccatcgtgggcagctgcgcaaccgtcttggccctcctggtccttagcctgatcctgtgtaaccagtgcagggggaagaaggccaaaaatcccaaagaggagaagaaaccgaaggagaagaagaaaaagggaagtgagaacgttgcttttgatgaccctgacaatatccctccctatggggatgacatgactgtgaggaagcagcctgaagggaacccaaaaccagatatcattgaaagggaaaacccctaccttatctatgatgaaactgatattcctcacaactcagaaaccatccccagcgcccctttggcatctccagagcaggagatagagcactatgacattgacaacgccagcagcatcgccccttcggatgcagacatcattcaacactacaagcagttccgcagccacacaccaaaattttcaatccagaggcacagtcccctaggctttgcaaggcaatcccccatgcccttaggagcaagcagtttgacttaccagccttcatatggtcaaggtttgagaaccagctccctaagccactcagcatgcccaactcccaaccctctgtctcgacacagtccagcccctttctccaaatcttctacgttctatagaaacagcccagcaagggaattgcatcttcctataagggatggtaatactttggaaatgcatggtgacacctgccaacctggcattttcaactatgccacaaggctgggaaggagaagcaagagtcctcaggccatggcatcacatggttctagaccagggagtcgcctaaagcagccgattgggcagattccactggaatcttctcctccagtcggactttctattgaagaagtggagaggctcaacacacctcgccctagaaacccaagtatctgcagtgcagaccatgggaggtcttcttcagaggaggactgcagaaggccactgtctagaacaaggaatccagcggatggcattccagctccagaatcctcttctgatagtgactcccatgaatctttcacttgctcagaaatggaatatgacagggagaagccaatggtatatacttccagaatgcccaaattatctcaagtcaatgaatctgatgcagatgatgaagataattatggagccagactgaagcctcgaaggtaccacggtcgcagggccgagggaggacctgtgggcacccaggcagcagcaccaggcactgctgacaacacactgcccatgaagctagggcagcaagcagggactttcaactgggacaaccttttgaactggggccctggctttggccattatgtagatgtttttaaagatttggcatctcttccagaaaaagcagcagcaaatgaagaaggcaaagctgggacaactaaaccagtccccaaagatggggaagcagaacagtatgtgtga

SEQ ID NO: 863 - DNA, 1863 bp, Homo Sapiens
atgcaggtgagcaagaggatgctggcggggggcgtgaggagcatgcccagccccctcctggcctgctggcagcccatcctcctgctggtgctgggctcagtgctgtcaggctcggccacgggctgcccgccccgctgcgagtgctccgcccaggaccgcgctgtgctgtgccaccgcaagcgctttgtggcagtccccgagggcatccccaccgagacgcgcctgctggacctaggcaagaaccgcatcaaaacgctcaaccaggacgagttcgccagcttcccgcacctggaggagctggagctcaacgagaacatcgtgagcgccgtggagcccggcgccttcaacaacctcttcaacctccggacgctgggtctccgcagcaaccgcctgaagctcatcccgctaggcgtcttcactggcctcagcaacctgaccaagctggacatcagcgagaacaagatcgttatcctactggactacatgtttcaggacctgtacaacctcaagtcactggaggttggcgacaatgacctcgtctacatctctcaccgcgccttcagcggcctcaacagcctggagcagctgacgctggagaaatgcaacctgacctccatccccaccgaggcgctgtcccacctgcacggcctcatcgtcctgaggctccggcacctcaacatcaatgccatccgggactactccttcaagaggctgtaccgactcaaggtcttggagatctcccactggccctacttggacaccatgacacccaactgcctctacggcctcaacctgacgtccctgtccatcacacactgcaatctgaccgctgtgccctacctggccgtccgccacctagtctatctccgcttcctcaacctctcctacaaccccatcagcaccattgagggctccatgttgcatgagctgctccggctgcaggagatccagctggtgggcgggcagctggccgtggtggagccctatgccttccgcggcctcaactacctgcgcgtgctcaatgtctctggcaaccagctgaccacactggaggaatcagtcttccactcggtgggcaacctggagacactcatcctggactccaacccgctggcctgcgactgtcggctcctgtgggtgttccggcgccgctggcggctcaacttcaaccggcagcagcccacgtgcgccacgcccgagtttgtccagggcaaggagttcaaggacttccctgatgtgctactgcccaactacttcacctgccgccgcgcccgcatccgggaccgcaaggcccagcaggtgtttgtggacgagggccacacggtgcagtttgtgtgccgggccgatggcgacccgccgcccgccatcctctggctctcaccccgaaagcacctggtctcagccaagagcaatgggcggctcacagtcttccctgatggcacgctggaggtgcgctacgcccaggtacaggacaacggcacgtacctgtgcatcgcggccaacgcgggcggcaacgactccatgcccgcccacctgcatgtgcgcagctactcgcccgactggccccatcagcccaacaagaccttcgctttcatctccaaccagccgggcgagggagaggccaacagcacccgcgccactgtgcctttccccttcgacatcaagaccctcatcatcgccaccaccatgggcttcatctctttcctgggcgtcgtcctcttctgcctggtgctgctgtttctctggagccggggcaagggcaacacaaagcacaacatcgagatcgagtatgtgccccgaaagtcggacgcaggcatcagctccgccgacgcgccccgcaagttcaacatgaagatgatatga

SEQ ID NO: 864 - DNA, 7311 bp, Homo Sapiens
atgggcttcctgcaccagctgcagctgctgctctggaagaacgtgacgctcaaacgccggagcccgtgggtcctggccttcgagatcttcatccccctggtgctgttctttatcctgctggggctgcgacagaagaagcccaccatctccgtgaaggaagtctccttctacacagcggcgcccctgacgtctgccggcatcctgcctgtcatgcaatcgctgtgcccggacggccagcgagacgagttcggcttcctgcagtacgccaactccacggtcacgcagctgcttgagcgcctggaccgcgtggtggaggaaggcaacctgtttgacccagcgcggcccagcctgggctcagagctcgaggccctacgccagcatctggaggccctcagtgcgggcccgggcacctcggggagccacctggacagatccacagtgtcttccttctctctggactcggtggccagaaacccgcaggagctctggcgtttcctgacgcaaaacttgtcgctgcccaatagcacggcccaagcactcttggccgcccgtgtggacccgcccgaggtctaccacctgctctttggtccctcatctgccctggattcacagtctggcctccacaagggtcaggagccctggagccgcctagggggcaatcccctgttccggatggaggagctgctgctggctcctgccctcctggagcagctcacctgcacgccgggctcgggggagctgggccggatcctcactgtgcctgagagtcagaagggagccctgcagggctaccgggatgctgtctgcagtgggcaggctgctgcgcgtgccaggcgcttctctgggctgtctgctgagctccggaaccagctggacgtggccaaggtctcccagcagctgggcctggatgcccccaacggctcggactcctcgccacaggcgccacccccacggaggctgcaggcgcttctgggggacctgctggatgcccagaaggttctgcaggatgtggatgtcctgtcggccctggccctgctactgccccagggtgcctgcactggccggacccccggacccccagccagtggtgcgggtggggcggccaatggcactggggcaggggcagtcatgggccccaacgccaccgctgaggagggcgcaccctctgctgcagcactggccaccccggacacgctgcagggccagtgctcagccttcgtacagctctgggccggcctgcagcccatcttgtgtggcaacaaccgcaccattgaacccgaggcgctgcggcggggcaacatgagctccctgggcttcacgagcaaggagcagcggaacctgggcctcctcgtgcacctcatgaccagcaaccccaaaatcctgtacgcgcctgcgggctctgaggtcgaccgcgtcatcctcaaggccaacgagacttttgcttttgtgggcaacgtgactcactatgcccaggtctggctcaacatctcggcggagatccgcagcttcctggagcagggcaggctgcagcaacacctgcgctggctgcagcagtatgtagcagagctgcggctgcaccccgaggcactgaacctgtcactggatgagctgccgccggccctgagacaggacaacttctcgctgcccagtggcatggccctcctgcagcagctggataccattgacaacgcggcctgcggctggatccagttcatgtccaaggtgagcgtggacatcttcaagggcttccccgacgaggagagcattgtcaactacaccctcaaccaggcctaccaggacaacgtcactgtttttgccagtgtgatcttccagacccggaaggacggctcgctcccgcctcacgtgcactacaagatccgccagaactccagcttcaccgagaaaaccaacgagatccgccgcgcctactggcggcctgggcccaatactggcggccgcttctacttcctctacggcttcgtctggatccaggacatgatggagcgcgccatcatcgacacttttgtggggcacgatgtggtggagccaggcagctacgtgcagatgttcccctacccctgctacacacgcgatgacttcctgtttgtcattgagcacatgatgccgctgtgcatggtgatctcctgggtctactccgtggccatgaccatccagcacatcgtggcggagaaggagcaccggctcaaggaggtgatgaagaccatgggcctgaacaacgcggtgcactgggtggcctggttcatcaccggctttgtgcagctgtccatctccgtgacagcactcaccgccatcctgaagtacggccaggtgcttatgcacagccacgtggtcatcatctggctcttcctggcagtctacgcggtggccaccatcatgttctgcttcctggtgtctgtgctgtactccaaggccaagctggcctcggcctgcggtggcatcatctacttcctgagctacgtgccctacatgtacgtggcgatccgagaggaggtggcgcatgataagatcacggccttcgagaagtgcatcgcgtccctcatgtccacgacggcctttggtctgggctctaagtacttcgcgctgtatgaggtggccggcgtgggcatccagtggcacaccttcagccagtccccggtggagggggacgacttcaacttgctcctggctgtcaccatgctgatggtggacgccgtggtctatggcatcctcacgtggtacattgaggctgtgcacccaggcatgtacgggctgccccggccctggtacttcccactgcagaagtcctactggctgggcagtgggcggacagaagcctgggagtggagctggccgtgggcacgcaccccccgcctcagtgtcatggaggaggaccaggcctgtgccatggagagccggcgctttgaggagacccgtggcatggaggaggagcccacccacctgcctctggttgtctgcgtggacaaactcaccaaggtctacaaggacgacaagaagctggccctgaacaagctgagcctgaacctctacgagaaccaggtggtctccttcttgggccacaacggggcgggcaagaccaccaccatgtccatcctgaccggcctgttccctccaacgtcgggttccgccaccatctacgggcacgacatccgcacggagatggatgagatccgcaagaacctgggcatgtgcccgcagcacaatgtgctctttgaccggctcacggtggaggaacacctctggttctactcacggctcaagagcatggctcaggaggagatccgcagagagatggacaagatgatcgaggacctggagctctccaacaaacggcactcactggtgcagacattgtcgggtggcatgaagcgcaagctgtccgtggccatcgccttcgtgggcggctctcgcgccatcatcctggacgagcccacggcgggcgtggacccctacgcgcgccgcgccatctgggacctcatcctgaagtacaagccaggccgcaccatccttctgtccacccaccacatggatgaggctgacctgcttggggaccgcattgccatcatctcccatgggaagctcaagtgctgcggctccccgctcttcctcaagggcacctatggcgacgggtaccgcctcacgctggtcaagcggcccgccgagccggggggcccccaagagccagggctggcatccagccccccaggtcgggccccgctgagcagctgctccgagctccaggtgtcccagttcatccgcaagcatgtggcctcctgcctgctggtctcagacacaagcacggagctctcctacatcctgcccagcgaggccgccaagaagggggctttcgagcgcctcttccagcacctggagcgcagcctggatgcactgcacctcagcagcttcgggctgatggacacgaccctggaggaagtgttcctcaaggtgtcggaggaggatcagtcgctggagaacagtgaggccgatgtgaaggagtccaggaaggatgtgctccctggggcggagggcccggcgtctggggagggtcacgctggcaatctggcccggtgctcggagctgacccagtcgcaggcatcgctgcagtcggcgtcatctgtgggctctgcccgtggcgacgagggagctggctacaccgacgtctatggcgactaccgccccctctttgataacccacaggacccagacaatgtcagcctgcaagaggtggaggcagaggccctgtcgagggtcggccagggcagccgcaagctggacggcgggtggctgaaggtgcgccagttccacgggctgctggtcaaacgcttccactgcgcccgccgcaactccaaggcactcttctcccagatcttgctgccagccttcttcgtctgcgtggccatgaccgtggccctgtccgtcccggagattggtgatctgcccccgctggtcctgtcaccttcccagtaccacaactacacccagccccgtggcaatttcatcccctacgccaacgaggagcgccgcgagtaccggctgcggctatcgcccgacgccagcccccagcagctcgtgagcacgttccggctgccgtcgggggtgggtgccacctgcgtgctcaagtctcccgccaacggctcgctggggcccacgttgaacctgagcagcggggagtcgcgcctgctggcggctcggttcttcgacagcatgtgtctggagtccttcacacaggggctgccactgtccaatttcgtgccacccccaccctcgcccgccccatctgactcgccagcgtccccggatgaggacctgcaggcctggaacgtctccctgccgcccaccgctgggccagaaatgtggacgtcggcaccctccctgccgcgcctggtacgggagcccgtccgctgcacctgctctgcgcagggcaccggcttctcctgccccagcagtgtgggcgggcacccgccccagatgcgggtggtcacaggcgacatcctgaccgacatcaccggccacaatgtctctgagtacctgctcttcacctccgaccgcttccgactgcaccggtatggggccatcacctttggaaacgtcctgaagtccatcccagcctcatttggcaccagggccccacccatggtgcggaagatcgcggtgcgcagggctgcccaggttttctacaacaacaagggctatcacagcatgcccacctacctcaacagcctcaacaacgccatcctgcgtgccaacctgcccaagagcaagggcaacccggcggcttacggcatcaccgtcaccaaccaccccatgaataagaccagcgccagcctctccctggattacctgctgcagggcacggatgtcgtcatcgccatcttcatcatcgtggccatgtccttcgtgccggccagcttcgttgtcttcctcgtggccgagaagtccaccaaggccaagcacctgcagtttgtcagcggctgcaaccccatcatctactggctggcgaactacgtgtgggacatgctcaactacctggtccccgctacctgctgtgtcatcatcctgtttgtgttcgacctgccggcctacacgtcgcccaccaacttccctgccgtcctctccctcttcctgctctatgggtggtccatcacgcccatcatgtacccggcctccttctggttcgaggtccccagctccgcctacgtgttcctcattgtcatcaatctcttcatcggcatcaccgccaccgtggccaccttcctgctacagctcttcgagcacgacaaggacctgaaggttgtcaacagttacctgaaaagctgcttcctcattttccccaactacaacctgggccacgggctcatggagatggcctacaacgagtacatcaacgagtactacgccaagattggccagtttgacaagatgaagtccccgttcgagtgggacattgtcacccgcggactggtggccatggcggttgagggcgtcgtgggcttcctcctgaccatcatgtgccagtacaacttcctgcggcggccacagcgcatgcctgtgtctaccaagcctgtggaggatgatgtggacgtggccagtgagcggcagcgagtgctccggggagacgccgacaatgacatggtcaagattgagaacctgaccaaggtctacaagtcccggaagattggccgtatcctggccgttgaccgcctgtgcctgggtgtgcgtcctggcgagtgcttcgggctcctgggcgtcaacggtgcgggcaagaccagcaccttcaagatgctgaccggcgacgagagcacgacggggggcgaggccttcgtcaatggacacagcgtgctgaaggagctgctccaggtgcagcagagcctcggctactgcccgcagtgtgacgcgctgttcgacgagctcacggcccgggagcacctgcagctgtacacgcggctgcgtgggatctcctggaaggacgaggcccgggtggtgaagtgggctctggagaagctggagctgaccaagtacgcagacaagccggctggcacctacagcggcggcaacaagcggaagctctccacggccatcgccctcattgggtacccagccttcatcttcctggacgagcccaccacaggcatggaccccaaggcccggcgcttcctctggaacctcatccttgacctcatcaagacagggcgttcagtggtgctgacatcacacagcatggaggagtgcgaggcgctgtgcacgcggctggccatcatggtgaacggtcgcctgcggtgcctgggcagcatccagcacctgaagaaccggtttggagatggctacatgatcacggtgcggaccaagagcagccagagtgtgaaggacgtggtgcggttcttcaaccgcaacttcccggaagccatgctcaaggagcggcaccacacaaaggtgcagtaccagctcaagtcggagcacatctcgctggcccaggtgttcagcaagatggagcaggtgtctggcgtgctgggcatcgaggactactcggtcagccagaccacactggacaatgtgttcgtgaactttgccaagaagcagagtgacaacctggagcagcaggagacggagccgccatccgcactgcagtcccctctcggctgcttgctcagcctgctccggccccggtctgcccccacggagctccgggcacttgtggcagacgagcccgaggacctggacacggaggacgagggcctcatcagcttcgaggaggagcgggcccagctgtccttcaacacggacacgctctgctga

SEQ ID NO: 865 - DNA, 1125 bp, Homo Sapiens
atggcgaacgaggttatcaagtgcaaggctgcagttgcttgggaggctggaaagcctctctccatagaggagatagaggtggcacccccaaaggctcatgaagttcgaatcaagatcattgccactgcggtttgccacaccgatgcctataccctgagtggagctgatcctgagggttgttttccagtgatcttgggacatgaaggtgctggaattgtggaaagtgttggtgagggagttactaagctgaaggcgggtgacactgtcatcccactttacatcccacagtgtggagaatgcaaattttgtctaaatcctaaaactaacctttgccagaagataagagtcactcaagggaaaggattaatgccagatggtaccagcagatttacttgcaaaggaaagacaattttgcattacatgggaaccagcacattttctgaatacacagttgtggctgatatctctgttgctaaaatagatcctttagcacctttggataaagtctgccttctaggttgtggcatttcaaccggttatggtgctgctgtgaacactgccaagttggagcctggctctgtttgtgccgtctttggtctgggaggagtcggattggcagttatcatgggctgtaaagtggctggtgcttcccggatcattggtgtggacatcaataaagataaatttgcaagggccaaagagtttggagccactgaatgtattaaccctcaggattttagtaaacccatccaggaagtgctcattgagatgaccgatggaggagtggactattcctttgaatgtattggtaatgtgaaggtcatgagagcagcacttgaggcatgtcacaagggctggggcgtcagcgtcgtggttggagtagctgcttcaggtgaagaaattgccactcgtccattccagctggtaacaggtcgcacatggaaaggcactgcctttggaggatggaagagtgtagaaagtgtcccaaagttggtgtctgaatatatgtccaaaaagataaaagttgatgaatttgtgactcacaatctgtcttttgatgaaatcaacaaagcctttgaactgatgcattctggaaagagcattcgaactgttgtaaagatttaa

SEQ ID NO: 866 - DNA, 3045 bp, Homo Sapiens
atggcggagtcttcggataagctctatcgagtcgagtacgccaagagcgggcgcgcctcttgcaagaaatgcagcgagagcatccccaaggactcgctccggatggccatcatggtgcagtcgcccatgtttgatggaaaagtcccacactggtaccacttctcctgcttctggaaggtgggccactccatccggcaccctgacgttgaggtggatgggttctctgagcttcggtgggatgaccagcagaaagtcaagaagacagcggaagctggaggagtgacaggcaaaggccaggatggaattggtagcaaggcagagaagactctgggtgactttgcagcagagtatgccaagtccaacagaagtacgtgcaaggggtgtatggagaagatagaaaagggccaggtgcgcctgtccaagaagatggtggacccggagaagccacagctaggcatgattgaccgctggtaccatccaggctgctttgtcaagaacagggaggagctgggtttccggcccgagtacagtgcgagtcagctcaagggcttcagcctccttgctacagaggataaagaagccctgaagaagcagctcccaggagtcaagagtgaaggaaagagaaaaggcgatgaggtggatggagtggatgaagtggcgaagaagaaatctaaaaaagaaaaagacaaggatagtaagcttgaaaaagccctaaaggctcagaacgacctgatctggaacatcaaggacgagctaaagaaagtgtgttcaactaatgacctgaaggagctactcatcttcaacaagcagcaagtgccttctggggagtcggcgatcttggaccgagtagctgatggcatggtgttcggtgccctccttccctgcgaggaatgctcgggtcagctggtcttcaagagcgatgcctattactgcactggggacgtcactgcctggaccaagtgtatggtcaagacacagacacccaaccggaaggagtgggtaaccccaaaggaattccgagaaatctcttacctcaagaaattgaaggttaaaaaacaggaccgtatattccccccagaaaccagcgcctccgtggcggccacgcctccgccctccacagcctcggctcctgctgctgtgaactcctctgcttcagcagataagccattatccaacatgaagatcctgactctcgggaagctgtcccggaacaaggatgaagtgaaggccatgattgagaaactcggggggaagttgacggggacggccaacaaggcttccctgtgcatcagcaccaaaaaggaggtggaaaagatgaataagaagatggaggaagtaaaggaagccaacatccgagttgtgtctgaggacttcctccaggacgtctccgcctccaccaagagccttcaggagttgttcttagcgcacatcttgtccccttggggggcagaggtgaaggcagagcctgttgaagttgtggccccaagagggaagtcaggggctgcgctctccaaaaaaagcaagggccaggtcaaggaggaaggtatcaacaaatctgaaaagagaatgaaattaactcttaaaggaggagcagctgtggatcctgattctggactggaacactctgcgcatgtcctggagaaaggtgggaaggtcttcagtgccacccttggcctggtggacatcgttaaaggaaccaactcctactacaagctgcagcttctggaggacgacaaggaaaacaggtattggatattcaggtcctggggccgtgtgggtacggtgatcggtagcaacaaactggaacagatgccgtccaaggaggatgccattgagcacttcatgaaattatatgaagaaaaaaccgggaacgcttggcactccaaaaatttcacgaagtatcccaaaaagttctaccccctggagattgactatggccaggatgaagaggcagtgaagaagctgacagtaaatcctggcaccaagtccaagctccccaagccagttcaggacctcatcaagatgatctttgatgtggaaagtatgaagaaagccatggtggagtatgagatcgaccttcagaagatgcccttggggaagctgagcaaaaggcagatccaggccgcatactccatcctcagtgaggtccagcaggcggtgtctcagggcagcagcgactctcagatcctggatctctcaaatcgcttttacaccctgatcccccacgactttgggatgaagaagcctccgctcctgaacaatgcagacagtgtgcaggccaaggtggaaatgcttgacaacctgctggacatcgaggtggcctacagtctgctcaggggagggtctgatgatagcagcaaggatcccatcgatgtcaactatgagaagctcaaaactgacattaaggtggttgacagagattctgaagaagccgagatcatcaggaagtatgttaagaacactcatgcaaccacacacaatgcgtatgacttggaagtcatcgatatctttaagatagagcgtgaaggcgaatgccagcgttacaagccctttaagcagcttcataaccgaagattgctgtggcacgggtccaggaccaccaactttgctgggatcctgtcccagggtcttcggatagccccgcctgaagcgcccgtgacaggctacatgtttggtaaagggatctatttcgctgacatggtctccaagagtgccaactactgccatacgtctcagggagacccaataggcttaatcctgttgggagaagttgcccttggaaacatgtatgaactgaagcacgcttcacatatcagcaagttacccaagggcaagcacagtgtcaaaggtttgggcaaaactacccctgatccttcagctaacattagtctggatggtgtagacgttcctcttgggaccgggatttcatctggtgtgaatgacacctctctactatataacgagtacattgtctatgatattgctcaggtaaatctgaagtatctgctgaaactgaaattcaattttaagacctccctgtggtaa

SEQ ID NO: 867 - DNA, 3042 bp, Homo Sapiens
atgggggacaagaaagatgacaaggactcacccaagaagaacaagggcaaggagcgccgggacctggatgacctcaagaaggaggtggctatgacagagcacaagatgtcagtggaagaggtctgccggaaatacaacacagactgtgtgcagggtttgacccacagcaaagcccaggagatcctggcccgggatgggcctaacgcactcacgccaccgcctaccaccccagagtgggtcaagttttgccggcagctcttcgggggcttctccatcctgctgtggatcggggctatcctctgcttcctggcctacggtatccaggcgggcaccgaggacgacccctctggtgacaacctgtacctgggcatcgtgctggcggccgtggtgatcatcactggctgcttctcctactaccaggaggccaagagctccaagatcatggagtccttcaagaacatggtgccccagcaagccctggtgatccgggaaggtgagaagatgcaggtgaacgctgaggaggtggtggtcggggacctggtggagatcaagggtggagaccgagtgccagctgacctgcggatcatctcagcccacggctgcaaggtggacaactcctccctgactggcgaatccgagccccagactcgctctcccgactgcactcacgacaaccccttggagactcggaacatcaccttcttttccaccaactgtgtggaaggcacggctcggggcgtggtggtggccacgggcgaccgcactgtcatgggccgtatcgccaccctggcatcagggctggaggtgggcaagacgcccatcgccatcgagattgagcacttcatccagctcatcaccggcgtggctgtcttcctgggtgtctccttcttcatcctctccctcattctcggatacacctggcttgaggctgtcatcttcctcatcggcatcatcgtggccaatgtcccagagggtctgctggccactgtcactgtgtgtctgacgctgaccgccaagcgcatggcccggaagaactgcctggtgaagaacctggaggctgtagaaaccctgggctccacgtccaccatctgctcagataagacagggaccctcactcagaaccgcatgacagtcgcccacatgtggtttgacaaccagatccacgaggctgacaccactgaggaccagtcagggacctcatttgacaagagttcgcacacctgggtggccctgtctcacatcgctgggctctgcaatcgcgctgtcttcaagggtggtcaggacaacatccctgtgctcaagagggatgtggctggggatgcgtctgagtctgccctgctcaagtgcatcgagctgtcctctggctccgtgaagctgatgcgtgaacgcaacaagaaagtggctgagattcccttcaattccaccaacaaataccagctctccatccatgagaccgaggaccccaacgacaaccgatacctgctggtgatgaagggtgcccccgagcgcatcctggaccgctgctccaccatcctgctacagggcaaggagcagcctctggacgaggaaatgaaggaggccttccagaatgcctaccttgagctcggtggcctgggcgagcgcgtgcttggtttctgccattattacctgcccgaggagcagttccccaagggctttgccttcgactgtgatgacgtgaacttcaccacggacaacctctgctttgtgggcctcatgtccatgatcgacccaccccgggcagccgtccctgacgcggtgggcaagtgtcgcagcgcaggcatcaaggtcatcatggtcaccggcgatcaccccatcacggccaaggccattgccaagggtgtgggcatcatctctgagggcaacgagactgtggaggacatcgccgcccggctcaacattcccgtcagccaggttaacccccgggatgccaaggcctgcgtgatccacggcaccgacctcaaggacttcacctccgagcaaatcgacgagatcctgcagaatcacaccgagatcgtcttcgcccgcacatccccccagcagaagctcatcattgtggagggctgtcagagacagggtgcaattgtggctgtgaccggggatggtgtgaacgactcccccgctctgaagaaggccgacattggggtggccatgggcatcgctggctctgacgtctccaagcaggcagctgacatgatcctgctggacgacaactttgcctccatcgtcacaggggtggaggagggccgcctgatcttcgacaacctaaagaagtccattgcctacaccctgaccagcaatatcccggagatcacgcccttcctgctgttcatcatggccaacatcccgctgcccctgggcaccatcaccatcctctgcatcgatctgggcactgacatggtccctgccatctcactggcgtacgaggctgccgaaagcgacatcatgaagagacagcccaggaacccgcggacggacaaattggtcaatgagagactcatcagcatggcctacgggcagattggaatgatccaggctctcggtggcttcttctcttactttgtgatcctggcagaaaatggcttcttgcccggcaacctggtgggcatccggctgaactgggatgaccgcaccgtcaatgacctggaagacagttacgggcagcagtggacatacgagcagaggaaggtggtggagttcacctgccacacggccttctttgtgagcatcgttgtcgtccagtgggccgatctgatcatctgcaagacccggaggaactcggtcttccagcagggcatgaagaacaagatcctgatcttcgggctgtttgaggagacggccctggctgccttcctgtcctactgccccggcatggacgtggccctgcgcatgtaccctctcaagcccagctggtggttctgtgccttcccctacagtttcctcatcttcgtctacgacgaaatccgcaaactcatcctgcgcaggaacccagggggttgggtggagaaggaaacctactactga

SEQ ID NO: 868 - DNA, 3816 bp, Homo Sapiens
atggtggacccggtgggcttcgcggaggcgtggaaggcgcagttcccggactcagagcccccgcgcatggagctgcgctcagtgggcgacatcgagcaggagctggagcgctgcaaggcctccattcggcgcctggagcaggaggtgaaccaggagcgcttccgcatgatctacctgcagacgttgctggccaaggaaaagaagagctatgaccggcagcgatggggcttccggcgcgcggcgcaggcccccgacggcgcctccgagccccgagcgtccgcgtcgcgcccgcagccagcgcccgccgacggagccgacccgccgcccgccgaggagcccgaggcccggcccgacggcgagggttctccgggtaaggccaggcccgggaccgcccgcaggcccggggcagccgcgtcgggggaacgggacgaccggggaccccccgccagcgtggcggcgctcaggtccaacttcgagcggatccgcaagggccatggccagcccggggcggacgccgagaagcccttctacgtgaacgtcgagtttcaccacgagcgcggcctggtgaaggtcaacgacaaagaggtgtcggaccgcatcagctccctgggcagccaggccatgcagatggagcgcaaaaagtcccagcacggcgcgggctcgagcgtgggggatgcatccaggcccccttaccggggacgctcctcggagagcagctgcggcgtcgacggcgactacgaggacgccgagttgaacccccgcttcctgaaggacaacctgatcgacgccaatggcggtagcaggcccccttggccgcccctggagtaccagccctaccagagcatctacgtcgggggcatgatggaaggggagggcaagggcccgctcctgcgcagccagagcacctctgagcaggagaagcgccttacctggccccgcaggtcctactccccccggagttttgaggattgcggaggcggctataccccggactgcagctccaatgagaacctcacctccagcgaggaggacttctcctctggccagtccagccgcgtgtccccaagccccaccacctaccgcatgttccgggacaaaagccgctctccctcgcagaactcgcaacagtccttcgacagcagcagtccccccacgccgcagtgccataagcggcaccggcactgcccggttgtcgtgtccgaggccaccatcgtgggcgtccgcaagaccgggcagatctggcccaacgatggcgagggcgccttccatggagacgcagatggctcgttcggaacaccacctggatacggctgcgctgcagaccgggcagaggagcagcgccggcaccaagatgggctgccctacattgatgactcgccctcctcatcgccccacctcagcagcaagggcaggggcagccgggatgcgctggtctcgggagccctggagtccactaaagcgagtgagctggacttggaaaagggcttggagatgagaaaatgggtcctgtcgggaatcctggctagcgaggagacttacctgagccacctggaggcactgctgctgcccatgaagcctttgaaagccgctgccaccacctctcagccggtgctgacgagtcagcagatcgagaccatcttcttcaaagtgcctgagctctacgagatccacaaggagttctatgatgggctcttcccccgcgtgcagcagtggagccaccagcagcgggtgggcgacctcttccagaagctggccagccagctgggtgtgtaccgggccttcgtggacaactacggagttgccatggaaatggctgagaagtgctgtcaggccaatgctcagtttgcagaaatctccgagaacctgagagccagaagcaacaaagatgccaaggatccaacgaccaagaactctctggaaactctgctctacaagcctgtggaccgtgtgacgaggagcacgctggtcctccatgacttgctgaagcacactcctgccagccaccctgaccaccccttgctgcaggacgccctccgcatctcacagaacttcctgtccagcatcaatgaggagatcacaccccgacggcagtccatgacggtgaagaagggagagcaccggcagctgctgaaggacagcttcatggtggagctggtggagggggcccgcaagctgcgccacgtcttcctgttcaccgacctgcttctctgcaccaagctcaagaagcagagcggaggcaaaacgcagcagtatgactgcaaatggtacattccgctcacggatctcagcttccagatggtggatgaactggaggcagtgcccaacatccccctggtgcccgatgaggagctggacgctttgaagatcaagatctcccagatcaagaatgacatccagagagagaagagggcgaacaagggcagcaaggctacggagaggctgaagaagaagctgtcggagcaggagtcactgctgctgcttatgtctcccagcatggccttcagggtgcacagccgcaacggcaagagttacacgttcctgatctcctctgactatgagcgtgcagagtggagggagaacatccgggagcagcagaagaagtgtttcagaagcttctccctgacatccgtggagctgcagatgctgaccaactcgtgtgtgaaactccagactgtccacagcattccgctgaccatcaataaggaagatgatgagtctccggggctctatgggtttctgaatgtcatcgtccactcagccactggatttaagcagagttcaaatctgtactgcaccctggaggtggattcctttgggtattttgtgaataaagcaaagacgcgcgtctacagggacacagctgagccaaactggaacgaggaatttgagatagagctggagggctcccagaccctgaggatactgtgctatgaaaagtgttacaacaagacgaagatccccaaggaggacggcgagagcacggacagactcatggggaagggccaggtccagctggacccgcaggccctgcaggacagagactggcagcgcaccgtcatcgccatgaatgggatcgaagtaaagctctcggtcaagttcaacagcagggagttcagcttgaagaggatgccgtcccgaaaacagacaggggtcttcggagtcaagattgctgtggtcaccaagagagagaggtccaaggtgccctacatcgtgcgccagtgcgtggaggagatcgagcgccgaggcatggaggaggtgggcatctaccgcgtgtccggtgtggccacggacatccaggcactgaaggcagccttcgacgtcaataacaaggacgtgtcggtgatgatgagcgagatggacgtgaacgccatcgcaggcacgctgaagctgtacttccgtgagctgcccgagcccctcttcactgacgagttctaccccaacttcgcagagggcatcgctctttcagacccggttgcaaaggagagctgcatgctcaacctgctgctgtccctgccggaggccaacctgctcaccttccttttccttctggaccacctgaaaagggtggcagagaaggaggcagtcaataagatgtccctgcacaacctcgccacggtctttggccccacgctgctccggccctccgagaaggagagcaagctccctgccaaccccagccagcctatcaccatgactgacagctggtccttggaggtcatgtcccaggtccaggtgctgctgtacttcctgcagctggaggccatccctgccccggacagcaagagacagagcatcctgttctccaccgaagtctaa

SEQ ID NO: 869 - DNA, 2175 bp, Homo Sapiens
atgcctgaggaagtgcaccatggagaggaggaggtggagacttttgcctttcaggcagaaattgcccaactcatgtccctcatcatcaataccttctattccaacaaggagattttccttcgggagttgatctctaatgcttctgatgccttggacaagattcgctatgagagcctgacagacccttcgaagttggacagtggtaaagagctgaaaattgacatcatccccaaccctcaggaacgtaccctgactttggtagacacaggcattggcatgaccaaagctgatctcataaataatttgggaaccattgccaagtctggtactaaagcattcatggaggctcttcaggctggtgcagacatctccatgattgggcagtttggtgttggcttttattctgcctacttggtggcagagaaagtggttgtgatcacaaagcacaacgatgatgaacagtatgcttgggagtcttctgctggaggttccttcactgtgcgtgctgaccatggtgagcccattggcaggggtaccaaagtgatcctccatcttaaagaagatcagacagagtacctagaagagaggcgggtcaaagaagtagtgaagaagcattctcagttcataggctatcccatcaccctttatttggagaaggaacgagagaaggaaattagtgatgatgaggcagaggaagagaaaggtgagaaagaagaggaagataaagatgatgaagaaaaacccaagatcgaagatgtgggttcagatgaggaggatgacagcggtaaggataagaagaagaaaactaagaagatcaaagagaaatacattgatcaggaagaactaaacaagaccaagcctatttggaccagaaaccctgatgacatcacccaagaggagtatggagaattctacaagagcctcactaatgactgggaagaccacttggcagtcaagcacttttctgtagaaggtcagttggaattcagggcattgctatttattcctcgtcgggctccctttgacctttttgagaacaagaagaaaaagaacaacatcaaactctatgtccgccgtgtgttcatcatggacagctgtgatgagttgataccagagtatctcaattttatccgtggtgtggttgactctgaggatctgcccctgaacatctcccgagaaatgctccagcagagcaaaatcttgaaagtcattcgcaaaaacattgttaagaagtgccttgagctcttctctgagctggcagaagacaaggagaattacaagaaattctatgaggcattctctaaaaatctcaagcttggaatccacgaagactccactaaccgccgccgcctgtctgagctgctgcgctatcatacctcccagtctggagatgagatgacatctctgtcagagtatgtttctcgcatgaaggagacacagaagtccatctattacatcactggtgagagcaaagagcaggtggccaactcagcttttgtggagcgagtgcggaaacggggcttcgaggtggtatatatgaccgagcccattgacgagtactgtgtgcagcagctcaaggaatttgatgggaagagcctggtctcagttaccaaggagggtctggagctgcctgaggatgaggaggagaagaagaagatggaagagagcaaggcaaagtttgagaacctctgcaagctcatgaaagaaatcttagataagaaggttgagaaggtgacaatctccaatagacttgtgtcttcaccttgctgcattgtgaccagcacctacggctggacagccaatatggagcggatcatgaaagcccaggcacttcgggacaactccaccatgggctatatgatggccaaaaagcacctggagatcaaccctgaccaccccattgtggagacgctgcggcagaaggctgaggccgacaagaatgataaggcagttaaggacctggtggtgctgctgtttgaaaccgccctgctatcttctggcttttcccttgaggatccccagacccactccaaccgcatctatcgcatgatcaagctaggtctaggtattgatgaagatgaagtggcagcagaggaacccaatgctgcagttcctgatgagatcccccctctcgagggcgatgaggatgcgtctcgcatggaagaagtcgattag

SEQ ID NO: 870 - DNA, 1761 bp, Homo Sapiens
atggcgactgcgacccccgtgccgccgcggatgggcagccgcgctggcggccccaccacgccgctgagccccacgcgcctgtcgcggctccaggagaaggaggagctgcgcgagctcaatgaccggctggcggtgtacatcgacaaggtgcgcagcctggagacggagaacagcgcgctgcagctgcaggtgacggagcgcgaggaggtgcgcggccgtgagctcaccggcctcaaggcgctctacgagaccgagctggccgacgcgcgacgcgcgctcgacgacacggcccgcgagcgcgccaagctgcagatcgagctgggcaagtgcaaggcggaacacgaccagctgctcctcaactatgctaagaaggaatctgatcttaatggcgcccagatcaagcttcgagaatatgaagcagcactgaattcgaaagatgcagctcttgctactgcacttggtgacaaaaaaagtttagagggagatttggaggatctgaaggatcagattgcccagttggaagcctccttagctgcagccaaaaaacagttagcagatgaaactttacttaaagtagatttggagaatcgttgtcagagccttactgaggacttggagtttcgcaaaagcatgtatgaagaggagattaacgagaccagaaggaagcatgaaacgcgcttggtagaggtggattctgggcgtcaaattgagtatgagtacaagctggcgcaagcccttcatgagatgagagagcaacatgatgcccaagtgaggctgtataaggaggagctggagcagacttaccatgccaaacttgagaatgccagactgtcatcagagatgaatacttctactgtcaacagtgccagggaagaactgatggaaagccgcatgagaattgagagcctttcatcccagctttctaatctacagaaagagtctagagcatgtttggaaaggattcaagaattagaggacttgcttgctaaagaaaaagacaactctcgtcgcatgctgacagacaaagagagagagatggcggaaataagggatcaaatgcagcaacagctgaatgactatgaacagcttcttgatgtaaagttagccctggacatggaaatcagtgcttacaggaaactcttagaaggcgaagaagagaggttgaagctgtctccaagcccttcttcccgtgtgacagtatcccgagcatcctcaagtcgtagtgtacgtacaactagaggaaagcggaagagggttgatgtggaagaatcagaggcgagtagtagtgttagcatctctcattccgcctcagccactggaaatgtttgcatcgaagaaattgatgttgatgggaaatttatccgcttgaagaacacttctgaacaggatcaaccaatgggaggctgggagatgatcagaaaaattggagacacatcagtcagttataaatatacctcaagatatgtgctgaaggcaggccagactgttacaatttgggctgcaaacgctggtgtcacagccagccccccaactgacctcatctggaagaaccagaactcgtggggcactggcgaagatgtgaaggttatattgaaaaattctcagggagaggaggttgctcaaagaagtacagtctttaaaacaaccatacctgaagaagaggaggaggaggaagaagcagctggagtggttgttgaggaagaacttttccaccagcagggaaccccaagagcatccaatagaagctgtgcaattatgtaa

SEQ ID NO: 871 - DNA, 1887 bp, Homo Sapiens
atggagcccccggacgcaccggcccaggcgcgcggggccccgcggctgctgttgctcgcagtcctgctggcggcgcacccagatgcccaggcggaggtgcgcttgtctgtacccccgctggtggaggtgatgcgaggaaagtctgtcattctggactgcacccctacgggaacccacgaccattatatgctggaatggttccttaccgaccgctcgggagctcgcccccgcctagcctcggctgagatgcagggctctgagctccaggtcacaatgcacgacacccggggccgcagtcccccataccagctggactcccaggggcgcctggtgctggctgaggcccaggtgggcgacgagcgagactacgtgtgcgtggtgagggcaggggcggcaggcactgctgaggccactgcgcggctcaacgtgtttgcaaagccagaggccactgaggtctcccccaacaaagggacactgtctgtgatggaggactctgcccaggagatcgccacctgcaacagccggaacgggaacccggcccccaagatcacgtggtatcgcaacgggcagcgcctggaggtgcccgtagagatgaacccagagggctacatgaccagccgcacggtccgggaggcctcgggcctgctctccctcaccagcaccctctacctgcggctccgcaaggatgaccgagacgccagcttccactgcgccgcccactacagcctgcccgagggccgccacggccgcctggacagccccaccttccacctcaccctgcactatcccacggagcacgtgcagttctgggtgggcagcccgtccaccccagcaggctgggtacgcgagggtgacactgtccagctgctctgccggggggacggcagccccagcccggagtatacgcttttccgccttcaggatgagcaggaggaagtgctgaatgtgaatctcgaggggaacttgaccctggagggagtgacccggggccagagcgggacctatggctgcagagtggaggattacgacgcggcagatgacgtgcagctctccaagacgctggagctgcgcgtggcctatctggaccccctggagctcagcgaggggaaggtgctttccttacctctaaacagcagtgcagtcgtgaactgctccgtgcacggcctgcccacccctgccctacgctggaccaaggactccactcccctgggcgatggccccatgctgtcgctcagttctatcaccttcgattccaatggcacctacgtatgtgaggcctccctgcccacagtcccggtcctcagccgcacccagaacttcacgctgctggtccaaggctcgccagagctaaagacagcggaaatagagcccaaggcagatggcagctggagggaaggagacgaagtcacactcatctgctctgcccgcggccatccagaccccaaactcagctggagccaattggggggcagccccgcagagccaatccccggacggcagggttgggtgagcagctctctgaccctgaaagtgaccagcgccctgagccgcgatggcatctcctgtgaagcctccaacccccacgggaacaagcgccatgtcttccacttcggcaccgtgagcccccagacctcccaggctggagtggccgtcatggccgtggccgtcagcgtgggcctcctgctcctcgtcgttgctgtcttctactgcgtgagacgcaaagggggcccctgctgccgccagcggcgggagaagggggctccgccgccaggggagccagggctgagccactcggggtcggagcaaccagagcagaccggccttctcatgggaggtgcctccggaggagccaggggtggcagcgggggcttcggagacgagtgctga

SEQ ID NO: 872 - DNA, 1527 bp, Homo Sapiens
atgctgcgccgcgctctgctgtgcctggccgtggccgccctggtgcgcgccgacgcccccgaggaggaggaccacgtcctggtgctgcggaaaagcaacttcgcggaggcgctggcggcccacaagtacctgctggtggagttctatgccccttggtgtggccactgcaaggctctggcccctgagtatgccaaagccgctgggaagctgaaggcagaaggttccgagatcaggttggccaaggtggacgccacggaggagtctgacctggcccagcagtacggcgtgcgcggctatcccaccatcaagttcttcaggaatggagacacggcttcccccaaggaatatacagctggcagagaggctgatgacatcgtgaactggctgaagaagcgcacgggcccggctgccaccaccctgcctgacggcgcagctgcagagtccttggtggagtccagcgaggtggctgtcatcggcttcttcaaggacgtggagtcggactctgccaagcagtttttgcaggcagcagaggccatcgatgacataccatttgggatcacttccaacagtgacgtgttctccaaataccagctcgacaaagatggggttgtcctctttaagaagtttgatgaaggccggaacaactttgaaggggaggtcaccaaggagaacctgctggactttatcaaacacaaccagctgccccttgtcatcgagttcaccgagcagacagccccgaagatttttggaggtgaaatcaagactcacatcctgctgttcttgcccaagagtgtgtctgactatgacggcaaactgagcaacttcaaaacagcagccgagagcttcaagggcaagatcctgttcatcttcatcgacagcgaccacaccgacaaccagcgcatcctcgagttctttggcctgaagaaggaagagtgcccggccgtgcgcctcatcaccctggaggaggagatgaccaagtacaagcccgaatcggaggagctgacggcagagaggatcacagagttctgccaccgcttcctggagggcaaaatcaagccccacctgatgagccaggagctgccggaggactgggacaagcagcctgtcaaggtgcttgttgggaagaactttgaagacgtggcttttgatgagaaaaaaaacgtctttgtggagttctatgccccatggtgtggtcactgcaaacagttggctcccatttgggataaactgggagagacgtacaaggaccatgagaacatcgtcatcgccaagatggactcgactgccaacgaggtggaggccgtcaaagtgcacagcttccccacactcaagttctttcctgccagtgccgacaggacggtcattgattacaacggggaacgcacgctggatggttttaagaaattcctggagagcggtggccaggatggggcaggggatgatgacgatctcgaggacctggaagaagcagaggagccagacatggaggaagacgatgatcagaaagctgtgaaagatgaactgtaa

SEQ ID NO: 873 - DNA, 2034 bp, Homo Sapiens
atggaaagcgacctgcaccagatcatccactcctcacagcccctcacactggaacacgtgcgctacttcctgtaccaactgctgcggggcctgaagtacatgcactcggctcaggtcatccaccgtgacctgaagccctccaacctattggtgaatgagaactgtgagctcaagattggtgactttggtatggctcgtggcctgtgcacctcgcccgctgaacatcagtacttcatgactgagtatgtggccacgcgctggtaccgtgcgcccgagctcatgctctctttgcatgagtatacacaggctattgacctctggtctgtgggctgcatctttggtgagatgctggcccggcgccagctcttcccaggcaaaaactatgtacaccagctacagctcatcatgatggtgctgggtaccccatcaccagccgtgattcaggctgtgggggctgagagggtgcgggcctatatccagagcttgccaccacgccagcctgtgccctgggagacagtgtacccaggtgccgaccgccaggccctatcactgctgggtcgcatgctgcgttttgagcccagcgctcgcatctcagcagctgctgcccttcgccaccctttcctggccaagtaccatgatcctgatgatgagcctgactgtgccccgccctttgactttgcctttgaccgcgaagccctcactcgggagcgcattaaggaggccattgtggctgaaattgaggacttccatgcaaggcgtgagggcatccgccaacagatccgcttccagccttctctacagcctgtggctagtgagcctggctgtccagatgttgaaatgcccagtccctgggctcccagtggggactgtgccatggagtctccaccaccagccccgccaccatgccccggccctgcacctgacaccattgatctgaccctgcagccacctccaccagtcagtgagcctgccccaccaaagaaagatggtgccatctcagacaatactaaggctgcccttaaagctgccctgctcaagtctttgaggagccggctcagagatggccccagcgcacccctggaggctcctgagcctcggaagccggtgacagcccaggagcgccagcgggagcgggaggagaagcggcggaggcggcaagaacgagccaaggagcgggagaaacggcggcaggagcgggagcgaaaggaacggggggctggggcctctgggggcccctccactgaccccttggctggactagtgctcagtgacaatgacagaagcctgttggaacgctggactcgaatggcccggcccgcagccccagccctcacctctgtgccggcccctgccccagcgccaacgccaaccccaaccccagtccaacctaccagtcctcctcctggccctgtagcccagcccactggcccgcaaccacaatctgcgggctctacctctggccctgtaccccagcctgcctgcccaccccctggccctgcaccccaccccactggccctcctgggcccatccctgtccccgcgccaccccagattgccacctccaccagcctcctggctgcccagtcacttgtgccaccccctgggctgcctggctccagcaccccaggagttttgccttacttcccacctggcctgccgcccccagacgccgggggagcccctcagtcttccatgtcagagtcacctgatgtcaaccttgtgacccagcagctatctaagtcacaggtggaggaccccctgccccctgtgttctcaggcacaccaaagggcagtggggctggctacggtgttggctttgacctggaggaattcttaaaccagtctttcgacatgggcgtggctgatgggccacaggatggccaggcagattcagcctctctctcagcctccctgcttgctgactggctcgaaggccatggcatgaaccctgccgatattgagtccctgcagcgtgagatccagatggactccccaatgctgctggctgacctgcctgacctccaggacccctga

SEQ ID NO: 874 - DNA, 2097 bp, Homo Sapiens
atgaggctcgccgtgggagccctgctggtctgcgccgtcctggggctgtgtctggctgtccctgataaaactgtgagatggtgtgcagtgtcggagcatgaggccactaagtgccagagtttccgcgaccatatgaaaagcgtcattccatccgatggtcccagtgttgcttgtgtgaagaaagcctcctaccttgattgcatcagggccattgcggcaaacgaagcggatgctgtgacactggatgcaggtttggtgtatgatgcttacctggctcccaataacctgaagcctgtggtggcagagttctatgggtcaaaagaggatccacagactttctattatgctgttgctgtggtgaagaaggatagtggcttccagatgaaccagcttcgaggcaagaagtcctgccacacgggtctaggcaggtccgctgggtggaacatccccataggcttactttactgtgacttacctgagccacgtaaacctcttgagaaagcagtggccaatttcttctcgggcagctgtgccccttgtgcggatgggacggacttcccccagctgtgtcaactgtgtccagggtgtggctgctccacccttaaccaatacttcggctactcgggagccttcaagtgtctgaaggatggtgctggggatgtggcctttgtcaagcactcgactatatttgagaacttggcaaacaaggctgacagggaccagtatgagctgctttgcctggacaacacccggaagccggtagatgaatacaaggactgccacttggcccaggtcccttctcataccgtcgtggcccgaagtatgggcggcaaggaggacttgatctgggagcttctcaaccaggcccaggaacattttggcaaagacaaatcaaaagaattccaactattcagctctcctcatgggaaggacctgctgtttaaggactctgcccacgggtttttaaaagtcccccccaggatggatgccaagatgtacctgggctatgagtatgtcactgccatccggaatctacgggaaggcacatgcccagaagccccaacagatgaatgcaagcctgtgaagtggtgtgcgctgagccaccacgagaggctcaagtgtgatgagtggagtgttaacagtgtagggaaaatagagtgtgtatcagcagagaccaccgaagactgcatcgccaagatcatgaatggagaagctgatgccatgagcttggatggagggtttgtctacatagcgggcaagtgtggtctggtgcctgtcttggcagaaaactacaataagagcgataattgtgaggatacaccagaggcagggtattttgctgtagcagtggtgaagaaatcagcttctgacctcacctgggacaatctgaaaggcaagaagtcctgccatacggcagttggcagaaccgctggctggaacatccccatgggcctgctctacaataagatcaaccactgcagatttgatgaatttttcagtgaaggttgtgcccctgggtctaagaaagactccagtctctgtaagctgtgtatgggctcaggcctaaacctgtgtgaacccaacaacaaagagggatactacggctacacaggcgctttcaggtgtctggttgagaagggagatgtggcctttgtgaaacaccagactgtcccacagaacactgggggaaaaaaccctgatccatgggctaagaatctgaatgaaaaagactatgagttgctgtgccttgatggtaccaggaaacctgtggaggagtatgcgaactgccacctggccagagccccgaatcacgctgtggtcacacggaaagataaggaagcttgcgtccacaagatattacgtcaacagcagcacctatttggaagcaacgtaactgactgctcgggcaacttttgtttgttccggtcggaaaccaaggaccttctgttcagagatgacacagtatgtttggccaaacttcatgacagaaacacatatgaaaaatacttaggagaagaatatgtcaaggctgttggtaacctgagaaaatgctccacctcatcactcctggaagcctgcactttccgtagaccttaa

SEQ ID NO: 875 - DNA, 3825 bp, Homo Sapiens
atggcgagcggcagtggagacagcgtcacccgtcggagcgtggcatcacagtttttcactcaagaggaggggccgggcatcgatggcatgaccacctcagagagggtggtggatcttctgaaccaggcggcgctgatcaccaatgactcaaagatcacagtgctcaaacaggtccaggagctgatcatcaacaaagaccccacactactggacaacttcctggatgagatcatcgcattccaagcagacaagtcaatcgaagtgcgaaaatttgtcatcggcttcatcgaggaggcatgcaagcgagacattgagttgctgctgaaactcattgcaaacctcaacatgctcttgagggacgagaatgtgaacgtggtgaagaaggctatcctcaccatgacccagctctacaaggtggccctgcagtggatggtaaagtcacgggtcattagcgagctacaggaggcctgctgggacatggtatctgccatggcgggggacatcatcctgctattggactctgacaatgacggcatccgcacccacgccatcaagtttgtggagggcctcattgtcaccctgtcaccccgcatggctgactcagagataccccgacgccaggagcatgatatcagcctggaccgcatccctcgtgaccacccctacatccagtacaacgtgctatgggaagagggcaaggcagccttggagcagctgcttaagttcatggtgcaccctgccatctcctccatcaacctgaccacagcgctgggctcccttgccaatatcgcccgccagagacccatgttcatgtctgaggtgatccaggcctatgaaactctgcatgccaacctgcccccgacgctggccaaatcgcaggtgagcagtgtgcgtaagaatctgaagctgcacctgttgagtgtgctgaagcacccggcttccttggagttccaggcccagatcaccaccctgctggtggacctgggcacacctcaggccgagatcgcccgcaacatgccgagcagcaaggacacccgcaagcggccccgcgatgactcggactccacactcaagaagatgaagctggagcccaacctgggggaggacgatgaggacaaagacttggagccaggcccgtcggggacctcgaaggcctcagcgcagatctccggccagtcagacacggacatcacagctgagttcctgcagcctctgctgacgcctgataatgtggctaatctggtcctcatcagcatggtgtacctacccgaggccatgccagcctccttccaggccatctacacccccgtggagtcagcaggcacggaagcccagatcaagcacctggctcggctcatggccacacagatgacagctgccggactgggaccaggtgtagagcagaccaaacagtgcaaggaggagcccaaggaggagaaggtggtgaagacagagagcgtcctgatcaagcggcgcctgtcagcccagggccaagccatctcggtggtgggttccctgagctccatgtcccccctggaggaagaggcaccgcaggccaagaggaggccagagcccattatccctgtcactcagccccggctggcaggcgctggtgggcgcaagaaaattttccgtctcagcgacgtgctgaagccccttaccgatgcccaggtggaagccatgaagctgggcgctgtgaagcggatcctgcgggctgagaaggctgtggcctgcagcggggcagcccaggtccgcataaagatcctggccagcctggtgacacagttcaactcgggcctgaaggcggaggtcctgtccttcatcctggaggatgtgcgggcccgcctggacctggccttcgcctggctctaccaggagtacaacgcctacctggccgcaggtgcctcgggctccctggacaagtatgaggactgcctcatccgcctgttgtctggcctgcaggagaaaccagaccagaaggatgggatcttcaccaaggttgtgctggaggcgccactcatcacagagagtgccctggaggtggtccgcaagtactgcgaggatgagagtcgcacctatctgggcatgtccacacttcgagacctgatcttcaagcgcccgtcccgccagttccagtacctgcatgtcctcctcgacctcagctcccatgagaaggacaaggtgcgctcccaggccctgctgttcatcaaacgcatgtatgagaaggagcagctgcgggagtatgtggagaaatttgccctcaactacctgcagctcctggtgcaccccaacccaccgtctgtgctgtttggagctgacaaggacacagaggtggcagcaccctggacggaggagacagtgaagcagtgtctgtacctctacctggccctcctgcctcagaaccacaagctgatccacgaactggcggccgtgtacactgaagccatcgccgacatcaagcggacggtgctgagggtcattgagcagccgatccgaggaatgggcatgaactccccggagctgctcctgctggtggaaaattgtcccaagggagcagagacactggtcacgagatgtctgcacagcctcacagacaaagtcccaccctccccagagctggtgaagcgggtccgggatctctaccacaagcgactgccagacgtccgcttcctcatcccggtgctcaatgggctggagaagaaagaggtgatccaggccctgcctaaactcatcaaactcaaccccatcgtggtgaaggaagtcttcaaccgcctgctgggcacccagcatggtgagggaaactcagccttgtccccgctgaaccctggagagctcctgatcgcattacacaacattgactccgtgaagtgcgacatgaaatccatcatcaaagccaccaacctgtgctttgcggagcggaacgtgtacacgtcagaggtgctggccgtggtgatgcagcagctgatggagcagagccccctgcccatgctgctcatgaggaccgtcatccagtccctgaccatgtacccccgcctggggggcttcgtcatgaacatcctgtcccgcctcatcatgaagcaggtgtggaagtaccccaaggtgtgggagggcttcatcaagtgctgccagcgcacaaagccccagagcttccaggtcatcctgcagctgccgccccagcagctgggagccgtctttgacaagtgcccagagctccgggagcccctgctggcccatgtccgctccttcaccccccaccagcaagctcacatccctaactccatcatgaccatcttggaggccagcggcaagcaggagccagaggccaaggaggcgcctgcggggcccttggaggaggatgatctggagcccctgaccttggccccggccccagcaccccggccccctcaggacctcatcggcctgcgactggcccaggagaaggccttaaagcggcagctggaggaggaacagaagctgaagccgggaggagtgggagccccctcctcttcctccccctctccctctccgtcggcccggccaggcccgcccccgtctgaggaagccatggatttccgggaggaggggcctgagtgcgagaccccgggcatcttcatcagcatggatgacgactcggggctgaccgaggccgcgctgttggactctagtctcgagggccccctacccaaggagacggcagcgggcgggctgaccttgaaggaggagcggagcccccagaccctcgcacctgttggagaagatgctatgaagactcccagcccggctgccgaggacgccagggaacccgaggccaaggggaacagctga

SEQ ID NO: 876 - DNA, 2877 bp, Homo Sapiens
atgaaggaagccaaggatgcccgctataccaatgggcacctcttcaccaccatttcagtttcaggcatgaccatgtgctatgcctgtaacaagagcatcacagccaaggaagccctcatctgcccaacctgcaatgtgactatccacaaccgctgtaaagacaccctcgccaactgtaccaaggtcaagcagaagcaacagaaagcggccctgctgaagaacaacaccgccttgcagtccgtttctcttcgaagtaagacaaccatccgggagcggccaagctcggccatctacccctccgacagcttccggcagtccctcctgggctcccgccgtggccgctcctccttgtctttagccaagagtgtttctaccaccaacattgctggacatttcaatgatgagtctcccctggggctgcgccggatcctctcacagtccacagactccctcaacatgcggaaccgaaccctatccgtggaatccctcattgacgaagaggtaatctacagtgagctgatgagtgactttgagatggatgagaaggactttgcagctgactcttggagtcttgctgtggacagcagcttcctgcagcagcataaaaaggaggtgatgaagcagcaagatgtcatctatgagctaatccagacagagctgcaccatgtgaggacactgaagatcatgacccgcctcttccgcacggggatgctggaagagctacacttggagccaggagtggtccagggcctgttcccctgcgtggacgagctcagtgacatccatacacgcttcctcagccagctattagaacgccgacgccaggccctgtgccctggcagcacccggaactttgtcatccatcgcttgggtgatctgctcatcagccagttctcaggtcctagtgcggagcagatgtgtaagacctactcggagttctgcagccgccacagcaaggccttaaagctctataaggagctgtacgcccgagacaaacgcttccagcaattcatccggaaagtgacccgccccgccgtgctcaagcggcacggggtacaggagtgcatcctgctggtgactcagcgcatcaccaagtacccgttactcatcagccgcatcctgcagcattcccacgggatcgaggaggagcgccaggacctgaccacagcactggggctagtgaaggagctgctgtccaatgtggacgagggtatttatcagctggagaaaggggcccgtctgcaggagatctacaaccgcatggaccctcgggcccaaaccccagtgcctggcaagggcccctttggccgagaggaacttctgaggcgcaaactcatccacgatggctgcctgctctggaagacagcgacggggcgcttcaaagatgtgctagtgctgctgatgacagatgtactggtgtttctccaggaaaaggaccagaagtacatctttcctaccctggacaagccttcagtggtatcgctgcagaatctaatcgtacgagacattgccaaccaggagaaagggatgtttctgatcagcgcagccccacctgagatgtacgaggtgcacacagcatcccgggatgaccggagcacctggatccgggtcattcagcagagcgtgcgcacatgcccatccagggaggacttccccctgattgagacagaggatgaggcttacctgcggcgaattaagatggagttgcagcagaaggaccgggcactggtggagctgctgcgagagaaggtcgggctgtttgctgagatgacccatttccaggccgaagaggatggtggcagtgggatggccctgcccaccctgcccaggggccttttccgctctgagtcccttgagtcccctcgtggcgagcggctgctgcaggatgccatccgtgaggtggagggtctgaaagacctgctggtggggccaggagtggaactgctcttgacaccccgagagccagccctgcccttggaaccagacagcggtggtaacacgagtcctggggtcactgccaatggtgaggccagaaccttcaatggctccattgaactctgcagagctgactcagactctagccagagggatcgaaatggaaatcagctgagatcaccgcaagaggaggcgttacagcgattggtcaatctctatggacttctacatggcctacaggcagctgtggcccagcaggacactctgatggaagcccggttccctgagggccctgagcggcgggagaagctgtgccgagccaactctcgggatggggaggctggcagggctggggctgcccctgtggcccctgaaaagcaggccacggaactggcattactgcagcggcaacatgcgctgctgcaggaggagctacggcgctgccggcggctaggtgaagaacgggcaaccgaagctggcagcctggaggcccggctccgggagagtgagcaggcccgggcactgctggagcgtgaggccgaagaggctcgaaggcagctggccgccctgggccagaccgagccactcccagctgaggccccctgggcccgcagacctgtggatcctcggcggcgcagcctccccgcaggcgatgccctgtacttgagtttcaaccccccacagcccagccgaggcactgaccgcctggatctacctgtcactactcgctctgtccatcgaaactttgaggaccgagagaggcaggaactggggagccccgaagagcggctgcaagacagcagtgaccctgacactggcagcgaggaggaaggtagcagccgtctgtctccgccccacagtccacgagactttaccagaatgcaggacatcccggaggagacggagagccgcgacggggaggctgtagcctccgagagctaa

SEQ ID NO: 877 - DNA, 1074 bp, Homo Sapiens
atgatagaacagcagaagcgtaagggcccagagttgccgctggttccagtcaagcggcagcggcatgagttgctgttgggagcggggtctggcccaggagccgggcagcagcaggcgacgccgggagccttgctgcaagcgggacctccaagatgttcctcccttcaagccccaatcatgctgctctctggacatgaaggggaagtctactgctgcaagttccaccccaacggatccaccttagcatctgcaggatttgaccgactgatattactgtggaatgtctatggtgactgtgataactatgccacactgaagggacacagtggagcagtgatggaattgcattacaacacagatggcagtatgcttttctcagcatccacagataaaaccgtggctgtgtgggatagtgaaacaggtgagagggttaaaaggctaaagggacatacttcctttgtgaattcctgttatccagccaggagaggccctcagcttgtctgcactggcagtgacgatggcacagttaagctttgggacatccggaagaaagcagccatccagacatttcagaacacgtaccaggtgttagctgtgaccttcaatgacacaagtgatcagattatttctggtggaatagacaatgatatcaaggtctgggacctgcgccagaacaagctaacctacaccatgagaggccatgcagattcagtgactggcctgagtttaagttctgaaggctcttatcttttgtccaatgcaatggacaatacagttcgtgtctgggatgtccggccatttgcccccaaagagagatgtgtaaagatatttcaaggaaatgtgcacaactttgaaaagaaccttctgagatgttcttggtcacctgatggaagcaaaatagcagctggctcagccgacaggtttgtttatgtgtgggataccacaagcaggagaatattgtataagctgcccggccatgctggctccatcaatgaagtggctttccaccctgatgagcccatcattatctcagcatcgagtgacaagagactgtatatgggagagattcagtga

SEQ ID NO: 878 - DNA, 4491 bp, Homo Sapiens
atggcggaggagcggcccccccggctggtggattacttcgtggtagctgggcttgcagggaacggagcacccatccctgaggaaacgtgggttcctgaacccagtgggcccctgcgccctccccggccagctgagcccatcacagatgtggcagtcatcgctagggcactgggcgaggaagtgccccagggctacacatgcatccaggcttctgctgggggccaccccttggaactcagtgctggacttctgggtggaactcaacccgtcatctgctaccgcaggggccgtgacaagccccccctcgttgagctgggggtgttgtatgaggggaaggaacgtcccaagcctggcttccaagtgcttgacacgacaccctacagccactcagcaaacctggcccctccaggccccgggcacccccgcacctacctcacttaccggcgggcagcagagggggcagggctgcatgccctgggcatcactgacctctgcctggtgctgcccagtaagggcgagggcactcctcatacttactgccggctgccccgcaacctcaaccctggcatgtggggcccagcagtgtacctgtgctataaggtgggcctggcgaaggccaacacgctggtgtacgaggcagagctgctgggccgctacccggaggaggacaatgaggcgttcccgctgcccgagtcagtgcccgtcttctgcctgcccatgggggccactatcgagtgctggcctgcccagaccaagtaccccgtgcccgtcttctccacctttgtgctcacgggtgcagctggtgataaggtgtatggtgccgccctgcagttctacgaggcgttcccaagggccaggctatcagagcgacaggcacgggcactgggcctgctgagcgccgtggagcggggtcgggcactggggggcagagctgtgcgcagccggcgtgccatcgctgtgctgtcccgctggcctgccttccctgccttccgcgccttcctcaccttcctttaccgctactccgtctcaggcccccaccgcctacccttggaagcgcacatctcccacttcattcacaacgttcccttcccttccccacagagaccccgcatcctagtgcagatgtctccctatgacaacttgctcctctgtcagcctgtatcctcacccctgcccctcagtggtgccagcttcctgcagctgctgcagagcctgggccctgagctggctatcacactgctgctggctgtgctcacagagcacaagctgctagtccactcgctgcggccagacctgctcaccagcgtctgtgaggccctcgtctcgatgatcttcccactgcactggcagtgcccctacattcctctgtgcccgctggtgctggcagatgtgctgagtgccccagtgcccttcattgtgggtatccactccagctactttgatctgcatgacccgcctgctgatgtcatctgtgtagaccttgataccaacacgctcttccagactgaggaaaagaagctcctctcccctcggaccctgccccgcagaccctacaaggttctgctggccacactgacaaacctgtaccagcagctggaccagacatacactggacctgaggaggaagcatccctggagttcctactgacagactacgaggcagtgtgtggccgcagggcccggctggagcgcgaagtccaaggagccttcctccgcttcatggcctgtctgctcaagggctaccgggtcttcctgcgcccactcacccaggccccctccgagggagctcgtgatgttgacaaccttttcttcctgcagggcttcctcaaatcccgggaacgctccagccacaaactttactctcagctgctgcacacacagatgttctcacagttcattgaggagtgctcttttggctctgctcgccatgctgcccttgaattctttgactcttgtgttgaaaaggtccacccagagcaggagaagcctgagccgacacccttagtggagctagaggagctgtcaggaagtgagctcactgtctttatcacacctcccgaggagcctgccttaccagagggcagtgaatccactccccagtactgctatgatggattcccagagctacgggctgagttgtttgagtctcttcaagagcaacctggggccctgcctgtgccaggcccttcccgtagcgcccccagcagtcctgctcctcgccgtaccaaacaggagatgaaagttgcacagcggatggcacagaagtcagcagctgtgcctgagctgtgggcccggtgcctgctggggcactgctatgggctgtggttcctgtgtctgcctgcctatgtgcggtcggcaccctcccgagtgcaggcactgcacacagcctaccatgtgctgcgccagatggagagcggcaaggtggtgctccctgatgaggtgtgttaccgggtactgatgcagctctgctcacactatgggcagcctgtgctgtctgtgcgggtcatgctggagatgcgtcaggcaggcattgtgcccaacaccatcacctatggctactacaataaggctgtgttggaaagcaagtggccgtctggcacaccaggtgggcgtctgcgctgggccaagctccggaatgttgtcctgggggctgctcagttccgccagcccttgagagaacggcaacagcagcagcagcagcaacagcagcagcagcagcagcagcagcaggagcaggtgtcagcacatcaagaggcaggcagctcccaggcagagccctatttggagcgcccttcccctactcgccctcttcagcgccagactacttgggctgggcgaagtctgagagacccagcctcaccccctggacgcctggtgaagagtggtagcctgggcagtgcccgaggggcacagcccactgtggaggccggtgtggcccacatgatagaggccttgggggtcctggaaccccggggatcacctgtgccctggcacgatggaagtctctcagacctgagcctgacaggggaggagccgctccctggaggcagcccagggggctcaggctcagccctgagtgcccagtccactgaggccctggaagggctaagtgggcggggacccaaggctggtgggcgacaggatgaggcaggcaccccccgacgagggctgggtgcccgcctccaacagctgctcactccttcccgccactcccctgcctcccgcattcccccacctgagctgcctcctgacctgccacccccagcccgccgcagccccatggacagtcttctgcacccccgggagcgccctggatccactgcctccgagagctcagcctctctgggcagtgagtgggacctctcagaatcttctctcagcaacctgagtcttcgccgttcctcagagcgcctcagtgacacccctggatccttccagtcaccttccctggaaattctgctgtccagctgctccctgtgccgtgcctgtgattcgctggtgtatgatgaggaaatcatggctggctgggcacctgatgactctaacctcaacacaacctgccccttctgcgcctgcccctttgtgcccctgctcagtgtccagacccttgattcccggcccagtgtccccagccccaaatctgctggtgccagtggcagcaaagatgctcctgtccctggtggtcctggccctgtgctcagtgaccgaaggctctgccttgctctggatgagccccagctctgcaacgggcacatggggggagcctcccggcgggttgagagtggggcatgggcatacctgagccccctggtgctgcgtaaggagctggagtcgctggtagagaacgagggcagtgaggtgctggcgttgcctgaactgccctctgcccaccccatcatcttctggaaccttttgtggtatttccaacggctacgcctgcccagtattctaccaggcctggtgctggcctcctgtgatgggccttcgcactcccaggccccatctccttggctaacccctgatccagcctctgttcaggtacggctgctgtgggatgtactgacccctgaccccaatagctgcccacctctctatgtgctctggagggtccacagccagatcccccagcgggtggtatggccaggccctgtacctgcatcccttagtttggcactgttggagtcagtgctgcgccatgttggactcaatgaagtgcacaaggctgtggggctcctgctggaaactctagggcccccacccactggcctgcacctgcagaggggaatctaccgtgagatattattcctgacaatggctgctctgggcaaggaccacgtggacatagtggccttcgataagaagtacaagtctgcctttaacaagctggccagcagcatgggcaaggaggagctgaggcaccggcgggcgcagatgcccactcccaaggccattgactgccgaaaatgttttggagcacctccagaatgctag

SEQ ID NO: 879 - DNA, 1566 bp, Homo Sapiens
atgtctctgtctcgctcagaggagatgcaccggctcacggaaaatgtctataagaccatcatggagcagttcaaccctagcctccggaacttcatcgccatggggaagaattacgagaaggcactggcaggtgtgacgtatgcagccaaaggctactttgacgccctggtgaagatgggggagctggccagcgagagccagggctccaaagaactcggagacgttctcttccagatggctgaagtccacaggcagatccagaatcagctggaagaaatgctgaagtcttttcacaacgagctgcttacgcagctggagcagaaggtggagctggactccaggtatctgagtgctgcgctgaagaaataccagactgagcaaaggagcaaaggcgacgccctggacaagtgtcaggctgagctgaagaagcttcggaagaagagccagggcagcaagaatcctcagaagtactcggacaaggagctgcagtacatcgacgccatcagcaacaagcagggcgagctggagaattacgtgtccgacggctacaagaccgcactgacagaggagcgcaggcgcttctgcttcctggtggagaagcagtgcgccgtggccaagaactccgcggcctaccactccaagggcaaggagctgctggcgcagaagctgccgctgtggcaacaggcctgtgccgaccccagcaagatcccggagcgcgcggtgcagctcatgcagcaggtggccagcaacggcgccaccctccccagcgccctgtcggcctccaagtccaacctggtcatttccgaccccattccgggggccaagcccctgccggtgccccccgagctggcaccgttcgtggggcggatgtctgcccaggagagcacacccatcatgaacggcgtcacaggcccggatggcgaggactacagcccgtgggctgaccgcaaggctgcccagcccaaatccctgtctcctccgcagtctcagagcaagctcagcgactcctactccaacacactccccgtgcgcaagagcgtgaccccaaaaaacagctatgccaccaccgagaacaagactctgcctcgctcgagctccatggcagccggcctggagcgcaatggccgtatgcgggtgaaggccatcttctcccacgctgctggggacaacagcaccctcctgagcttcaaggagggtgacctcattaccctgctggtgcctgaggcccgcgatggctggcactacggagagagtgagaagaccaagatgcggggctggtttcccttctcctacacccgggtcttggacagcgatggcagtgacaggctgcacatgagcctgcagcaagggaagagcagcagcacgggcaacctcctggacaaggacgacctggccatcccaccccccgattacggcgccgcctcccgggccttccccgcccagacggccagcggcttcaagcagaggccctacagtgtggccgtgcccgccttctcccagggcctggatgactatggagcgcggtccatgagcagtggcagcggcacgctggtgtccacagtgtga

SEQ ID NO: 880 - DNA, 1620 bp, Homo Sapiens
atgcccgagaatgtggcaccccggagcggggcgactgccggggctgccggcggccgcgggaaaggcgcctatcaggaccgcgacaagccagcccagatccgcttcagcaacatttccgccgccaaagcggttgctgatgctattagaacaagccttggaccaaaaggaatggataaaatgattcaagatggaaaaggtgatgtaaccattacaaatgatggtgctaccattctgaaacaaatgcaagtattacatccagcagccagaatgctggtggagctgtctaaggctcaagatatagaagcaggagatggcaccacatcagtagtcatcattgctggctccctcttagattcttgtaccaagcttcttcagaaagggattcatccaaccatcatttctgagtcattccagaaggccctggaaaagggcattgaaatcttgactgacatgtctcgacctgtggaactgagtgacagagaaactttgttaaatagtgcaaccacttcactgaactcaaaggtggtttctcagtattcaagtctgctttctccaatgagtgtaaatgcagtgatgaaagtgattgacccagccacagccaccagtgtagatcttagagatattaaaatagttaagaagcttggtgggacaattgatgactgtgagttggtggaagggctggttctcacccaaaaagtgtcaaattctggcataaccagagttgaaaaggccaagattgggcttattcagttttgcttatctgctcccaaaacagacatggataatcaaatagtggtttctgactatgcccagatggaccgagtgctgcgagaagagagagcctatattttaaatttagtgaagcaaattaaaaaaacaggatgtaatgtccttctcatacagaaatctattctaagagatgctcttagtgatcttgcattacactttctgaataaaatgaagatcatggtgattaaggatattgaaagagaagacattgaattcatttgtaagacaattggaaccaagccagttgctcatattgaccaatttactgctgacatgctgggttctgctgagttagctgaggaggtcaatttaaatggttctggcaaactgctcaagattacaggctgtgccagccctggaaaaacagttacaattgttgttcgtggttctaacaaactggtgattgaagaagctgagcgctccattcatgatgccctatgtgttattcgttgtttagtgaagaagagggctcttattgcaggaggtggtgctccagaaatagagttggccctacgattaactgaatattcacgaacactgagtggtatggaatcctactgcgttcgtgcttttgcagatgctatggaggtcattccatctacactagctgaaaatgccggcctgaatcccatttctacagtaacagaactaagaaaccggcatgcccagggagaaaaaactgcaggcattaatgtccgaaagggtggtatttccaacattttggaggaactggttgtccagcctctgttggtatcagtcagtgctctgactcttgcaactgaaactgttcggagcattctgaaaatagatgatgtggtaaacactcgataa

SEQ ID NO: 881 - DNA, 2394 bp, Homo Sapiens
atggcgcaccgctgtttgcggctgtggggccggggcggctgctggccccgcggcctacagcagctcctcgtgcctggcggcgtgggcccgggcgagcagccctgcctccggacgctttaccgatttgttacaactcaagcaagggccagcagaaattctcttttgacagatataattgctgcttatcaaagattctgttctcgacccccaaaaggatttgaaaaatactttcctaatggaaaaaatggaaaaaaagctagtgaacctaaagaagttatgggagagaaaaaagaatcaaagccagctgctaccacacgctcttctggaggaggaggtggtggcggtggaaaacgaggtggcaagaaagatgattctcactggtggtccaggtttcagaagggtgacattccatgggacgacaaggatttcaggatgttcttcctctggactgctctgttctggggtggagtcatgttttacttgctgctcaagagatccgggagagaaatcacttggaaggactttgtcaataactatctttcaaaaggagtagtagacagattggaagtcgtcaacaagcgttttgttcgagtgacctttacaccaggaaaaactcctgttgatgggcaatacgtttggtttaatattggcagtgtggacacctttgaacggaatctggaaactttacagcaggaattgggcatagaaggagaaaatcgggtgcctgttgtctacattgctgaaagtgatggctcttttctgctgagcatgctgcctacggtgctcatcatcgccttcttgctctacaccatcagaagagggcctgctggcattggccggacaggccgagggatgggcggactcttcagtgtcggagaaaccactgccaaggtcttaaaggatgaaattgatgtgaagttcaaagatgtggctggctgtgaggaggccaagctagagatcatggaatttgtgaatttcttgaaaaacccaaagcagtatcaagacctaggagcaaaaatcccaaagggtgccattctcactggtcctccaggcactgggaagacgctgctagctaaggccacagccggagaagccaatgtccccttcatcaccgttagtggatctgagtttttggagatgttcgttggtgtgggccctgctagagtccgagacttatttgcccttgctcggaagaatgccccttgcatcctcttcatcgatgaaatcgatgcggtgggaaggaagagaggaagaggcaactttggagggcagagtgagcaggagaacacactcaaccagctgctggtggagatggatggttttaatacaacaacaaatgtcgtcattttggccggcaccaatcgaccagatatcctggaccccgcgctgcttaggccggggcgtttcgacaggcagatctttattggaccaccagacataaaaggaagagcttctattttcaaagttcatctccgaccgctaaaactggacagtaccctggagaaggataaattggcaagaaaactggcatctttaactccagggttttcaggtgctgatgttgctaatgtctgtaatgaagctgcgttgattgctgcaaggcatctgtcagattccataaatcagaaacactttgaacaggcaattgaacgagtgattggtggcttagagaagaaaacgcaggttctgcagcctgaggagaagaagactgtggcataccacgaagcaggccatgcggttgccggctggtatctggagcacgcagacccgcttttaaaggtatccatcatcccacgtggcaaaggactaggttatgctcagtatttaccaaaagaacaatacctctataccaaagagcagctcttggataggatgtgtatgactttaggtggtcgagtctctgaagaaatcttctttggaagaattacaactggtgctcaagatgacttgagaaaagtaactcagagtgcatatgcccaaattgttcagtttggcatgaatgaaaaggttgggcaaatctcctttgacctcccacgtcagggggacatggtattggagaaaccttacagtgaagccactgcaagattgatagatgatgaagtacgaatacttattaatgatgcttataaaagaacagtagctcttctcacagaaaagaaagctgacgtggagaaggttgctcttctgttgttagaaaaagaagtattagataagaatgatatggttgaacttttgggccccagaccatttgcggaaaaatctacctatgaagaatttgtggaaggcactggcagcttggatgaggacacctcacttccagaaggccttaaggactggaacaaggagcgggaaaaggagaaagaggagcccccgggtgagaaagttgccaactag

SEQ ID NO: 882 - DNA, 2178 bp, Homo Sapiens
atggccatggactcgtcgcttcaggcccgcctgtttcccggtctcgctatcaagatccaacgcagtaatggtttaattcacagtgccaatgtaaggactgtgaacttggagaaatcctgtgtttcagtggaatgggcagaaggaggtgccacaaagggcaaagagattgattttgatgatgtggctgcaataaacccagaactcttacagcttcttcccttacatccgaaggacaatctgcccttgcaggaaaatgtaacaatccagaaacaaaaacggagatccgtcaactccaaaattcctgctccaaaagaaagtcttcgaagccgctccactcgcatgtccactgtctcagagcttcgcatcacggctcaggagaatgacatggaggtggagctgcctgcagctgcaaactcccgcaagcagttttcagttcctcctgcccccactaggccttcctgccctgcagtggctgaaataccattgaggatggtcagcgaggagatggaagagcaagtccattccatccgaggcagctcttctgcaaaccctgtgaactcagttcggaggaaatcatgtcttgtgaaggaagtggaaaaaatgaagaacaagcgagaagagaagaaggcccagaactctgaaatgagaatgaagagagctcaggagtatgacagtagttttccaaactgggaatttgcccgaatgattaaagaatttcgggctactttggaatgtcatccacttactatgactgatcctatcgaagagcacagaatatgtgtctgtgttaggaaacgcccactgaataagcaagaattggccaagaaagaaattgatgtgatttccattcctagcaagtgtctcctcttggtacatgaacccaagttgaaagtggacttaacaaagtatctggagaaccaagcattctgctttgactttgcatttgatgaaacagcttcgaatgaagttgtctacaggttcacagcaaggccactggtacagacaatctttgaaggtggaaaagcaacttgttttgcatatggccagacaggaagtggcaagacacatactatgggcggagacctctctgggaaagcccagaatgcatccaaagggatctatgccatggcctcccgggacgtcttcctcctgaagaatcaaccctgctaccggaagttgggcctggaagtctatgtgacattcttcgagatctacaatgggaagctgtttgacctgctcaacaagaaggccaagctgcgcgtgctggaggacggcaagcaacaggtgcaagtggtggggctgcaggagcatctggttaactctgctgatgatgtcatcaagatgatcgacatgggcagcgcctgcagaacctctgggcagacatttgccaactccaattcctcccgctcccacgcgtgcttccaaattattcttcgagctaaagggagaatgcatggcaagttctctttggtagatctggcagggaatgagcgaggcgcggacacttccagtgctgaccggcagacccgcatggagggcgcagaaatcaacaagagtctcttagccctgaaggagtgcatcagggccctgggacagaacaaggctcacaccccgttccgtgagagcaagctgacacaggtgctgagggactccttcattggggagaactctaggacttgcatgattgccacgatctcaccaggcataagctcctgtgaatatactttaaacaccctgagatatgcagacagggtcaaggagctgagcccccacagtgggcccagtggagagcagttgattcaaatggaaacagaagagatggaagcctgctctaacggggcgctgattccaggcaatttatccaaggaagaggaggaactgtcttcccagatgtccagctttaacgaagccatgactcagatcagggagctggaggagaaggctatggaagagctcaaggagatcatacagcaaggaccagactggcttgagctctctgagatgaccgagcagccagactatgacctggagacctttgtgaacaaagcggaatctgctctggcccagcaagccaagcatttctcagccctgcgagatgtcatcaaggccttgcgcctggccatgcagctggaagagcaggctagcagacaaataagcagcaagaaacggccccagtga

SEQ ID NO: 883 - DNA, 873 bp, Homo Sapiens
atgtccttgaagcttcaggcaagcaatgtaaccaacaagaatgaccccaagtccatcaactctcgagtcttcattggaaacctcaacacagctctggtgaagaaatcagatgtggagaccatcttctctaagtatggccgtgtggccggctgttctgtgcacaagggctatgcctttgttcagtactccaatgagcgccatgcccgggcagctgtgctgggagagaatgggcgggtgctggccgggcagaccctggacatcaacatggctggagagcctaagcctgacagacccaaggggctaaagagagcagcatctgccatatacaggctcttcgactaccggggccgtctgtcgcccgtgccagtgcccagggcggtccctgtgaagcgaccccgggtcacagtccctttggtccggcgtgtcaaaactaacgtacctgtcaagctctttgcccgctccacagctgtcaccaccagctcagccaagatcaagttaaagagcagtgagctgcaggccatcaagacggagctgacacagatcaagtccaatatcgatgccctgctgagccgcttggagcagatcgctgcggagcaaaaggccaatccagatggcaagaagaagggtgatggaggtggcgccggcggcggcggcggtggtggtggcagcggtggcggtggcagtggtggtggcggtggcggtggcagcagccggccaccagccccccaagagaacacaacttctgaggcaggcctgccccagggggaagcacggacccgagacgacggcgatgaggaagggctcctgacacacagcgaggaagagctggaacacagccaggacacagacgcggatgatggggccttgcagtaa

SEQ ID NO: 884 - DNA, 1578 bp, Homo Sapiens
atggtgtcccggccagagcccgagggcgaggccatggacgccgagctggcggtagcgccgccgggctgctcgcacctgggcagcttcaaggtggacaactggaagcagaacctgcgggccatctaccagtgcttcgtgtggagcggcacggctgaggcccgcaagcgcaaggccaagtcctgtatctgccatgtctgtggcgtccacctcaacaggctgcattcctgcctctactgtgtcttcttcggctgtttcacaaagaagcatattcacgagcatgcgaaggcgaagcggcacaacctggccattgatctgatgtacggaggcatctactgttttctgtgccaggactacatctatgacaaagacatggaaataatcgccaaggaggagcagcgaaaagcttggaaaatgcaaggcgttggagagaagttttcaacttgggaaccaaccaaacgggagcttgaactgctgaagcacaacccgaaaaggagaaagatcacctcgaactgcaccataggtctgcgtgggctgatcaaccttgggaacacatgcttcatgaactgcatcgtgcaggccctgacccacacgccacttctgcgggacttcttcctgtctgacaggcaccgctgtgagatgcagagccccagctcctgtctggtctgtgagatgtcctcactgtttcaggagttttactctggacaccggtcccctcacatcccgtataagttgctgcacctggtgtggacccacgcgaggcacctagcaggctacgagcagcaggacgcccacgagttcctcatcgcggccctggacgtgctccaccgacactgcaaaggtgatgacaatgggaagaaggccaacaaccccaaccactgcaactgcatcatagaccagatcttcacaggcgggttgcagtcagacgtcacctgccaagtctgccatggagtctccaccaccatcgaccccttctgggacatcagcttggatctccccggctcttccaccccattctggcccctgagcccagggagcgagggcaacgtggtaaacggggaaagccacgtgtcgggaaccaccacgctcacggactgcctgcgacgattcaccagaccagagcacttgggcagcagcgccaagatcaagtgcagcggttgccatagctaccaggagtccacaaagcagctcactatgaagaaactgcccatcgtagcctgttttcatctcaaacgatttgaacactcagccaagctgcggcggaagatcaccacgtatgtgtccttccccctggagctggacatgacccctttcatggcctccagcaaagagagcaggatgaatggacagtaccagcagcccacggacagtctcaacaatgacaacaagtattccctgtttgctgttgttaaccatcaagggaccttggagagtggccactacaccagctttatccggcagcacaaagaccagtggttcaagtgtgacgatgccatcatcaccaaggccagcatcaaggacgtcctggacagcgaagggtacttgctgttctatcacaaacagttcctggaatacgagtag

SEQ ID NO: 885 - DNA, 15552 bp, Homo Sapiens
atggcgacgagcggcggcgaagaggcggcggcagcggctccggcgccggggaccccggcaacgggggcggacacgaccccgggctgggaggtggctgtgcggcccctgctgtccgcgtcctactccgccttcgagatgaaggagttgccgcagctggtggcctcagtcatcgagagtgaatcagaaatcctgcaccatgagaagcagtacgagccattctactcatcttttgttgcactttccacacactatattacaacagtttgcagtctcattccccggaaccaacttcagtcagtggcagcagcctgtaaagttctaattgagttttctctcctgcgtctggagaatccagatgaggcttgtgctgtgtcccagaaacacttgattctcctaatcaagggcctgtgcactggctgtagccgactagatagaactgaaattatcacatttacagcaatgatgaaatccgccaagctgccccaaacagtgaagacactttcagacgtggaagatcagaaagagctggcctcaccagtaagccctgagttgaggcaaaaggaggtacagatgaattttttgaaccagctgacctcagtttttaaccctagaactgtagcatcacaacctatcagtacacagactctggtggaaggagaaaatgatgagcagtcatctacagatcaagcctcagctatcaaaaccaagaatgtgttcatagctcagaacgtggctagtcttcaagagcttggtggctcggagaagctactgcgtgtatgtttgaacctgccatatttcctacgctatatcaatcggttccaagatgcagttttagctaattccttcttcataatgcctgcaacagtagcagatgccactgctgttcgtaatggctttcattcattggtgattgatgtaactatggcattggataccctttctctacctgtgttggaacctctcaatccttctcgtctacaagatgtgacagtcctcagcctaagttgtctgtatgcaggtgtgagtgtggcaacgtgcatggccatcctccatgtgggtagtgcccagcaagtgcggacagggtccacgagctccaaagaagatgactatgaaagtgacgcagctacaattgtccagaaatgtctcgaaatctatgacatgattggacaagcaatcagcagttctcgccgggctggtggtgagcactatcagaatttccaattgctgggtgcttggtgcttgttaaacagccttttcctcatactgaacctcagtcctactgcgttggctgataaggggaaagagaaggacccactggctgccctccgagtcagagacatcctttctcgtactaaagagggagtgggctcccctaaactggggcctggaaaagggcatcagggatttggggtactctcagtaatattggcaaaccatgccatcaaactgctaacgtctctctttcaagacctacaagtggaggcccttcacaagggttgggagacagatggcccccctgcagccttgagcattatggcccagagcacctccatacagaggattcaacggctgattgactctgtcccactgatgaacctgctcttgacgttactttcaacttcctacagaaaggcatgtgtcctgcagcggcagaggaagggctccatgagcagcgatgccagcgcctccaccgactccaatacttactatgaggacgatttcagtagcacggaggaggacagcagccaagacgatgacagtgagcctattttggggcaatggtttgaggagactatttctcccagtaaagagaaagcagcacctccgcctcctcccccacctcctccactggaaagctctcctcgggttaaaagccccagtaagcaggcccctggtgagaagggcaacattctggcgagtcgcaaagatcctgagttgttcttaggtctggcttccaacattttgaacttcatcacctcttccatgctgaactctcggaacaattttatccgaaactatctgagtgtatctctttcagaacaccatatggccaccctagccagtatcatcaaggaggtggacaaagatggactcaagggttcatcagatgaagagtttgctgcagctctctatcacttcaaccactcactggtaacctctgaccttcagtcacctaacctgcagaacacactgttgcagcagctaggagtggctcctttttctgagggcccttggcccttgtacattcaccctcaaagcctctctgtgctttcacgcctcctgctcatctggcaacataaagccagtgctcaaggtgaccctgacgtcccagaatgccttaaagtttgggacaggtttttgtctacaatgaagcagaatgccctgcaaggtgtggtgcccagtgagacagaggatctgaatgtagaacacctgcagatgctcctcctcattttccacaatttcaccgagacaggccggcgggccatattgtcgctttttgtccagatcatccaggagttgagcgtcaacatggatgctcagatgcgcttcgtgccgcttatcttggctcgcctccttctcatctttgattatctgcttcatcagtactccaaagcccctgtgtatctatttgagcaggtacagcataacctgctaagtcctccctttgggtgggcaagtggatcccaggacagcaacagccgccgggcaaccactcctctctatcatggattcaaagaagtagaagaaaactggtctaagcatttctcatcagatgctgtcccacaccccagattctactgtgtcctgtccccagaagcctcagaggatgatttgaaccgacttgattctgtggcatgtgacgtccttttctccaagcttgtcaagtatgatgagctttatgctgcactgacagccctgcttgcagctgggtcccagcttgatacagttaggagaaaggaaaacaagaatgtaacagccttggaggcctgtgcccttcaatattacttcttgatactgtggaggatcctaggaattttaccaccatcaaagacttacattaaccagctatccatgaactcacctgagatgagcgaatgtgacatcttgcacactctgcgatggtcttctcggctccggatcagctcctatgtcaactggataaaggatcaccttatcaaacagggaatgaaggctgagcatgctagctcgcttctagaactggcatccaccactaagtgtagctcagtgaaatatgatgttgaaatagtagaggaatacttcgctcgacagatctcatccttctgtagtatcgactgtaccaccatcttgcagctgcatgaaattcccagtctgcagtccatctacacccttgatgccgcgatctcaaaggtccaggtctctttggatgagcatttttctaagatggctgctgagactgatcctcataagtcgtctgagattaccaagaacctacttccagccacgctgcaactcattgacacctatgcatcgttcaccagagcctatttgctgcaaaactttaatgaagagggaacaactgagaaaccttccaaggagaaactgcaaggctttgctgctgttttggctattggctctagcaggtgcaaggcaaatactctgggtccgacactggttcagaatttgccatcgtcagtgcagactgtgtgtgagtcctggaacaacatcaataccaatgaatttcccaatattggatcctggcgcaatgcctttgccaatgacaccatcccttcagagagttatattagtgcagtgcaggctgcacacctggggactctctgtagccaaagtctgcccctggctgcttccctgaagcataccctcctctcactggtcaggttgactggagatcttattgtttggtcagatgagatgaacccaccacaggtaattcggacactgctacctcttcttttggaatcaagcactgagagtgttgccgagatcagtagcaactccctggaacgcatcttgggccctgctgagtctgatgagttcttggctcgtgtttatgagaagctgatcactggttgttacaacattctggccaatcatgcagatcctaacagtggactggatgaatccatcctggaggaatgtctccagtacttggaaaagcagctggaaagtagccaggctcgtaaagctatggaggagtttttctctgacagtggagaacttgtacagatcatgatggcaacagccaatgagaacctctctgctaaattctgtaaccgagttttgaaattcttcaccaaactcttccagctgactgagaagagccctaacccgagcctgttgcatctctgtggctccctggcacaactggcctgtgtggaacctgtgcgcctgcaggcctggctcacccgcatgactacatcgcccccaaaagattctgatcagctggatgtaattcaggagaaccggcagctgctgcagttactgaccacatacattgttcgggaaaacagccaagttggggaaggtgtgtgtgctgttcttctgggcaccctgactcccatggcaacagagatgctggccaacggtgatgggactggcttccctgaacttatggttgtgatggccactctggccagtgcaggtcaaggtgctggtcaccttcagcttcataatgctgctgtggattggctgagcagatgcaagaaatacctgtcacagaagaatgtagttgaaaaactgaatgccaatgtaatgcatggaaagcatgtgatgatcttggagtgcacatgccatatcatgtcttacttggctgatgtcacgaatgccctgagccagagtaatggtcaaggcccaagtcatctctcagtggatggggaagagcgggccattgaagtagactcagactgggtggaggagttggcggtggaagaggaagattcccaggctgaggattcagatgaagattctctttgcaataaactctgcacttttacgatcacacagaaagaattcatgaaccagcattggtaccactgtcacacctgtaaaatggtggatggcgtgggtgtctgcacagtgtgtgctaaggtgtgccacaaggatcatgagatttcctatgccaagtatggatccttcttctgtgactgtggagccaaggaagatggcagctgtttggctctggtgaagagaactcctagcagtggcatgagctctaccatgaaggagtcggcatttcagagtgaacccaggatttcagagagtctagtgcgtcatgccagcacctcctcgccagctgacaaagccaaggttaccatcagtgatggaaaggttgctgacgaagagaagcccaagaagagcagcctctgccgcacagtagagggctgccgggaggaattacagaaccaggccaatttctccttcgctcctctcgtgttagacatgcttaatttccttatggatgccattcagaccaacttccagcaagcttcagccgtcgggagcagcagccgtgctcagcaagccctcagtgagctacacactgtggagaaggcagtggagatgacagaccagctgatggttcccaccttagggtcccaggaaggtgcctttgagaatgtgcggatgaattacagtggagaccagggccagaccatccggcagctgatcagtgctcatgtgctcaggcgggtggctatgtgtgtgctctcctctccccatgggcgccgccaacatttggctgtcagccatgagaagggcaagatcaccgttctgcagctctctgcactcctgaagcaagcagattccagcaaaaggaagttaactctgacccgcttggcttctgccccagttccttttactgtgttgagcctcacaggaaatccctgcaaggaagactacttggcggtttgtgggctaaaggactgtcatgtgctcacctttagtagctcaggctctgtttcggatcacttggttttgcaccctcagttggcaacggggaacttcatcatcaaagccgtgtggttacctggttcacagaccgagttagcaattgtcaccgcagactttgttaagatttatgacctgtgtgttgatgccttgagtccaaccttctattttctcctgccaagctcaaagataagagatgttaccttccttttcaatgaggagggaaagaacatcattgttataatgtcttcggctgggtacatctatactcagcttatggaagaggccagcagtgcccagcagggacccttctatgtcactaatgtgttggaaatcaatcatgaggacctgaaggacagtaacagccaggtggcgggcggtggtgtgtccgtgtactactcccacgtgttgcagatgttgttcttcagctattgtcaaggcaaatcattcgcagccaccatcagcaggacaaccctggaggtgttgcaactcttccccatcaacatcaaaagttccaatggtggcagtaagacttctcctgctctttgccagtggtctgaggtgatgaaccaccctggcttggtgtgctgtgtccagcaaactacaggggtgccgctggtagttatggtgaaaccagacacttttcttatccaggagattaagactcttcctgctaaagcgaagatccaagacatggttgctattaggcacacggcctgcaatgagcagcagcggacaacaatgattctgctgtgtgaggatggcagcctgcgcatttacatggccaacgtggagaacacctcctactggctgcagccatccctgcagcccagcagtgtcatcagcatcatgaagcctgttcgaaagcgcaaaacagctacaatcacaacccgcacgtctagccaggtgactttccccattgacttttttgaacacaaccagcagctgacagatgtggagtttggtggtaacgacctcctacaggtctataatgcacaacagataaaacaccggctgaattccactggcatgtatgtggccaacaccaagcccggaggcttcaccattgagattagtaacaacaatagcactatggtgatgacaggcatgcggatccagattgggactcaagcaatagaacgggccccgtcatatatcgagatcttcggcagaactatgcagctcaacctgagtcgctcacgctggtttgacttccccttcaccagagaagaagccctgcaggctgataagaagctgaacctcttcattggggcctcggtggatccagcaggtgtcaccatgatagatgctgtaaaaatttatggcaagactaaggagcagtttggctggcctgatgagcccccagaagaattcccttctgcctctgtcagcaacatctgcccttcaaatctgaaccagagcaacggcactggagatagcgactcagctgcccccactacgaccagtggaactgtcctggagaggctggttgtgagttctttagaagccctggaaagctgctttgccgttggcccaatcatcgagaaggagagaaacaagaatgctgctcaggagctggccactttgctgttgtccctgccagcacctgccagtgtccagcagcagtccaagagccttctggccagcctgcacaccagccgctcggcctaccacagccacaaggatcaggccttgctgagcaaagctgtgcagtgtctcaacacatctagcaaagagggcaaggatttggaccctgaggtgttccagaggctagtgatcacagctcgctccattgccatcatgcgccccaacaaccttgtccactttacggagtcaaagctgccccagatggaaacagaaggaatggatgaagggaaggaaccgcagaagcagttggaaggagattgctgtagtttcatcacccagcttgtgaaccacttctggaaactccatgcatccaaacccaagaatgccttcttggcacctgcctgccttccaggactaactcatattgaagctactgtcaatgctctggtggacatcatccatggctactgtacctgtgagctggattgtattaacacagcatccaagatctacatgcagatgctcttgtgtcctgatcctgctgtgagcttctcttgtaaacaagctctaattcgagtcctaaggcccaggaacaaacggagacatgtgactttaccctcttcccctcgaagcaacactccaatgggagacaaggatgatgatgacgatgatgatgcagatgagaaaatgcagtcatcagggatcccgaatggtggtcacatccgtcaggaaagccaggaacagagtgaggtggaccatggagattttgagatggtgtctgagtcgatggtcctggagacagctgaaaatgtcaacaatggcaacccctctcccctggaggccctgctggcaggcgcagagggcttcccccccatgctggacatcccacctgatgcagatgacgagaccatggttgaactagccattgccctgagcctgcagcaggaccaacaaggcagcagcagcagtgccctgggcctgcagagcctgggactgtccggccaggcacccagctcttcctctctggacgcaggaaccctctctgacaccacagcatcagctccagcctcagacgacgagggcagtacagcagcgacagatggttctacccttcggacctctcctgctgaccacggtggtagtgtgggctcggagagcgggggcagtgcagtggactcagtggctggcgagcacagtgtatctggccggagcagtgcttatggcgatgctacagctgaggggcatccggctggaccaggaagtgtcagctcaagcactggagccatcagcaccaccactgggcaccaggagggagatggctccgagggagaaggagaaggagaaactgaaggagatgtccacactagcaacaggctgcacatggtccgtctaatgctgttggagagattactgcagaccctgcctcaattacgaaacgttggcggtgtccgggccatcccatacatgcaggtcattctaatgctcactacagatctggatggagaagatgagaaagacaagggggccctagacaacctgctctcccagcttattgctgagttgggtatggataaaaaggatgtctccaagaagaatgagcgcagcgccctgaatgaagtccatctggtagtaatgagactcctgagtgtcttcatgtcccgcaccaaatctggatccaagtcttccatatgtgagtcatcttccctcatctccagtgccacagcagcagctctactgagctctggggctgtggactactgcctgcacgtgctcaaatcactgctggaatattggaagagccaacagaatgacgaggagcctgtggctaccagccagttgctgaaaccacatactacctcctccccacctgacatgagcccattctttctccgccagtatgtgaagggtcatgctgctgatgtgtttgaggcctatactcagcttctaacagaaatggtactgaggcttccttaccaaatcaaaaagattactgacaccaattctcgaatcccacctcctgtctttgaccactcgtggttttactttctctccgagtacctcatgatccagcagactccatttgtgcgccgtcaagtccgcaaacttctgctcttcatctgtggatccaaagagaagtaccgccagctccgggatttgcacaccctggactctcacgtgcgtgggatcaagaagctgctagaagagcaggggatattcctccgggcaagtgtggttacagccagctcaggctccgccttgcaatatgacacactcatcagcctgatggagcacctgaaagcctgtgcagagattgccgcccagcgaaccatcaactggcagaaattctgcatcaaagatgactccgtcctgtacttcctcctccaagtcagtttccttgtggatgagggcgtgtccccagtgctgctgcaactgctctcctgtgctctgtgcggcagcaaggtgctcgctgcactggcagcctcttcgggatcctccagtgcttcttcctcctcagcccctgtggctgccagttctggacaagccacaacacagtccaagtcttccactaaaaagagcaagaaagaagaaaaagaaaaggagaaagatggtgagacctctggcagccaggaggaccagctgtgcacagctctggtgaaccagctgaacaaatttgccgataaggaaaccctgatccagttcctgcgttgtttcctgttagagtccaattcttcctcggtgcgctggcaggcccactgtctgacactgcacatctacagaaattccagcaaatctcaacaggagctcctgctagatctgatgtggtccatctggccagaactcccagcctatggtcgtaaggctgcccagtttgtggacctactaggatatttctccctgaaaactccacaaacagagaagaagttgaaggagtattcacagaaggctgtggagattctgcggactcaaaaccatattcttaccaaccaccccaactcgaacatttataacactttgtctggcttagtggagtttgatggctattacctggagagcgatccctgcctggtgtgtaataacccggaagtaccgttctgttatatcaagctgtcttccattaaagtggacacgcggtacaccaccacccagcaggttgtgaagctcattggcagtcacaccatcagcaaagtgacagtgaaaatcggggatctgaaacggaccaagatggtgcggaccatcaacctgtattataacaaccgaaccgtgcaggccatcgtggagttgaaaaacaagccagctcgctggcacaaagccaagaaggttcagctgacccctggacagacagaggtgaagattgacctgccgttgcccattgtggcctccaatctgatgattgagtttgcagacttctatgaaaactaccaggcctccacagagaccctgcagtgccctcgctgtagtgcctcggtccctgccaacccaggagtctgtggcaactgtggagagaatgtgtaccagtgtcacaaatgcagatccatcaactacgatgaaaaggatcccttcctctgcaatgcctgtggcttctgtaaatatgcccgcttcgacttcatgctctatgccaagccttgctgtgcagtggatcccattgagaatgaagaagaccggaagaaggctgtatccaacatcaatacacttttggacaaagctgatcgagtgtatcatcagctgatgggacaccggccacagctggagaacctgctctgcaaagtgaatgaggcagctccagaaaagccacaggatgactcaggaacagcagggggcatcagctccacttctgccagtgtgaatcgttacatcctgcagttggctcaggagtattgtggagactgcaagaactcttttgatgaactctccaaaatcatccagaaagtctttgcttcgcgcaaagagttgttggaatatgacctacagcagagggaagcagccactaaatcatcccggacctccgtgcagcccacattcactgccagccagtaccgtgccttatccgtcctgggctgtggccacacatcctccaccaagtgctatggctgcgcctcggctgtcacagaacattgtatcacactacttcgggccctggccaccaacccagccttgaggcacatccttgtctcccagggccttatccgggagctctttgattataatcttcgccgaggggctgcggccatgcgggaggaggtccgccagctcatgtgcctcctaactcgagacaacccagaagccacccaacagatgaatgacctgattattggcaaggtctccacagccctgaagggccactgggccaaccccgatctggcaagtagcctgcagtatgaaatgctgctgctgacggattctatctccaaggaggacagctgctgggagctccggttacgctgtgctctcagccttttcctcatggctgtgaacattaagactcctgtggtggttgaaaacattaccctcatgtgcctgaggatcttgcagaagctgataaaaccacctgctcccactagcaagaagaacaaggatgtccccgttgaggccctcaccacggtgaagccatactgcaatgagatccatgcccaggctcaactgtggctcaagagagaccccaaggcatcctatgatgcctggaagaagtgtcttcctatcagagggatagatggcaatgggaaagcccccagcaaatcagagctccgccatctctatttgactgagaagtatgtgtggaggtggaaacagttcctgagtcgtcgggggaagaggacctcccccttggatctcaaactggggcataacaactggctgcgacaagtgcttttcactccagcaacgcaggccgcacggcaggcagcctgtaccattgtggaagctctagccaccattcccagccgcaagcagcaggtcctggacctgcttaccagttacctggatgagctgagcatagctggggagtgtgcagctgagtacctggctctctaccagaagctcatcacttctgcgcactggaaagtctacttggcagctcggggagtcctaccctatgtgggcaacctcatcaccaaggaaatagctcgtctgctggccctggaggaggctaccctgagtaccgatctgcagcagggttatgcccttaaaagtctcacaggccttctctcctcctttgttgaggtggaatccatcaaaagacattttaaaagtcgcttggtgggtactgtgctgaatggatacctgtgcttgcggaagctggtggtgcagaggaccaagctgatcgatgagacgcaggacatgctgctggagatgctggaggacatgaccacaggtacagaatcagaaaccaaggccttcatggctgtgtgcattgagacagccaagcgctacaatctggatgactaccggaccccggtgttcatcttcgagaggctctgcagcatcatttatcctgaggagaatgaagtcactgagttctttgtgaccctggagaaggatccccaacaagaagacttcttacagggcaggatgcctgggaacccgtatagcagcaatgagccaggcatcgggccgctgatgagggatataaagaacaagatttgccaggactgtgacttagtggccctcctggaagatgacagtggcatggagcttctagtgaacaataaaatcattagtttggaccttcctgtggctgaagtttacaagaaagtctggtgtaccacgaatgagggagagcccatgaggattgtttatcgtatgcgggggctgctgggcgatgccacagaggagttcattgagtccctggactctactacagatgaagaagaagatgaagaagaagtgtataaaatggctggtgtgatggcccagtgtgggggcctggaatgcatgcttaacagactcgcagggatcagagatttcaagcagggacgccaccttctaacagtgctactgaaattgttcagttactgcgtgaaggtgaaagtcaaccggcagcaactggtcaaactggaaatgaacaccttgaacgtcatgctggggaccctaaacctggcccttgtagctgaacaagaaagcaaggacagtgggggtgcagctgtggctgagcaggtgcttagcatcatggagatcattctagatgagtccaatgctgagcccctgagtgaggacaagggcaacctcctcctgacaggtgacaaggatcaactggtgatgctcttggaccagatcaacagcacctttgttcgctccaaccccagtgtgctccagggcctgcttcgcatcatcccgtacctttcctttggagaggtggagaaaatgcagatcttggtggagcgattcaaaccatactgcaactttgataaatatgatgaagatcacagtggtgatgataaagtcttcctggactgcttctgtaaaatagctgctggcatcaagaacaacagcaatgggcaccagctgaaggatctgattctccagaaggggatcacccagaatgcacttgactacatgaaaaagcacatccctagcgccaagaatttggatgccgacatctggaaaaagtttttgtctcgcccagccttgccatttatcctaaggctgcttcggggcctggccatccagcaccctggcacccaggttctgattggaactgattccatcccgaacctgcataagctggagcaggtgtccagtgatgagggcattgggaccttggcagagaacctgctggaagccctgcgggaacaccctgacgtaaacaagaagattgacgcagcccgcagggagacccgggcagagaagaagcgcatggccatggcaatgaggcagaaggccctgggcaccctgggcatgacgacaaatgaaaagggccaggtcgtgaccaagacagcactcctgaagcagatggaagagctgatcgaggagcctggcctcacgtgctgcatctgcagggagggatacaagttccagcccacaaaggtcctgggcatttataccttcacgaagcgggtagccttggaggagatggagaataagccccggaaacagcagggctacagcaccgtgtcccacttcaacattgtgcactacgactgccatctggctgccgtcaggttggctcgaggccgggaagagtgggagagtgccgccctgcagaatgccaacaccaagtgcaacgggctccttccggtctggggacctcatgtccctgaatcagcttttgccacttgcttggcaagacacaacacttacctccaggaatgtacaggccagcgggagcccacgtatcagctcaacatccatgacatcaaactgctcttcctgcgcttcgccatggagcagtcgttcagcgcagacactggcgggggcggccgggagagcaacatccacctgatcccgtacatcattcacactgtgctttacgtcctgaacacaacccgagcaacttcccgagaagagaagaacctccaaggctttctggaacagcccaaggagaagtgggtggagagtgcctttgaagtggacgggccctactatttcacagtcttggcccttcacatcctgccccctgagcagtggagagccacacgtgtggaaatcttgcggaggctgttggtgacctcgcaggctcgggcagtggctccaggtggagccaccaggctgacagataaggcagtgaaggactattccgcttaccgttcttcccttctcttttgggccctcgtcgatctcatttacaacatgtttaagaaggtgcctaccagtaacacagagggaggctggtcctgctctctcgctgagtacatccgccacaacgacatgcccatctacgaagctgccgacaaagccctgaaaaccttccaggaggagttcatgccagtggagaccttctcagagttcctcgatgtggccggtcttttatcagaaatcaccgatccagagagcttcctgaaggacctgttgaactcagtcccctga

SEQ ID NO: 886 - DNA, 1065 bp, Homo Sapiens
atggctacgcccctggtggcgggtcccgcagctctacgcttcgccgccgcggctagctggcaggttgtgcgcggacgctgcgtggaacattttccgcgagtactggagtttctgcgatctctgcgcgctgttgcccctggcttggttcgctaccggcaccacgaacgcctttgtatgggcctaaaggccaaggtggtggtggagctgatcctgcagggccggccttgggcccaagtcctgaaagccctgaatcaccactttccagaatctggacctatagtgcgggatcccaaggctacaaagcaggatctgaggaagattttggaggcacaggaaactttttaccagcaggtgaagcagctgtcagaggctcctgtggatttggcctcgaagctgcaggaacttgaacaagagtatggggaaccctttctggctgccatggaaaagctgctttttgagtacttgtgtcagctggagaaagcactgcctacaccgcaggcacagcagcttcaggatgtgctgagttggatgcagcctggagtctctatcacctcttctcttgcctggagacaatatggtgtggacatggggtggctgcttccagagtgctctgttactgactcagtgaacctggctgagcccatggaacagaatcctcctcagcaacaaagactagcactccacaatcccctgccaaaagccaagcctggcacacatcttcctcagggaccatcttcaaggacgcacccagaacctctagctggccgacacttcaatctggcccctctaggccgacgaagagttcagtcccaatgggcctccactaggggaggccataaggagcgccccacagtcatgctgtttccctttaggaatctcggctcaccaacccaggtcatatctaagcctgagagcaaggaagaacatgcgatatacacagcagacctagccatgggcacaagagcagcctccactgggaagtctaagagtccatgccagaccctggggggaagggctctgaaggagaacccagttgacttgcctgccacagagcaaaaggagtga

SEQ ID NO: 887 - DNA, 1371 bp, Homo Sapiens
atgaagtgtgagcactgcacgcgcaaggaatgtagtaagaaaacaaaaactgatgaccaagagaatgtgtcagccgatgcaccgagtccagcccaggaaaatggagagaagggagaattccacaagttggctgatgccaagatatttttgagcgactgcctggcatgtgacagctgtatgactgcagaggaaggagtccaactttcccagcaaaatgccaaggacttcttccgcgttctgaaccttaacaagaaatgtgatacctcaaagcacaaagtgctggtagtgtctgtgtgtcctcaatctttgccttattttgctgctaaattcaacctcagtgtaactgatgcatccagaagactctgtggtttcctcaaaagtcttggggtgcactatgtatttgatacgacgatagctgcggattttagtatcctggagagtcaaaaagaattcgtgcgtcgctatcgccagcacagtgaggaggaacgcaccctgcccatgctgacctctgcctgtcctggctgggtccgatacgccgagcgggtgctgggtcgccccatcactgcccacctctgcaccgccaagtccccccagcaggtcatgggctctttggtgaaggattatttcgccagacagcagaacctgtctccagagaagattttccacgtcattgtggccccttgttatgacaagaagctggaggctcttcaggaaagccttccccctgctttgcatggctcccggggcgctgactgcgtgttaacatcaggtgaaattgctcaaataatggagcaaggtgacctctcagtgagagatgctgccgtcgacactctgtttggagacttgaaggaggacaaagtgacgcgtcatgatggagccagctcagacgggcacctggcacacatcttcagacatgcggccaaggagctgttcaacgaggatgtggaggaggtcacttaccgagccctgagaaacaaagacttccaagaggtcacccttgagaagaacggagaggtggtgttacgctttgctgcagcctatggctttcgaaacatccagaacatgatcctgaagcttaagaagggcaagttcccattccactttgtggaggtcctcgcctgtgctggaggatgcttaaatggcagaggccaagcccagactccagacggacatgcggataaggccctgctgcggcagatggaaggcatttacgctgacatccctgtgcggcgtccggagtccagtgcacacgtgcaggagctgtaccaggagtggctggaggggatcaactcccccaaggcccgagaggtgctgcataccacgtaccagagccaggagcgtggcacacacagcctggacatcaagtggtga

SEQ ID NO: 888 - DNA, 1257 bp, Homo Sapiens
atggccacaagtgaacagagtatctgccaagcccgggcttccgtgatggtctacgatgacaccagtaagaaatgggtaccaatcaaacctggccagcagggattcagccggatcaacatctaccacaacactgccagcaacaccttcagagtcgttggagtcaagttgcaggatcagcaggttgtgatcaattattcaatcgtgaaagggctgaagtacaatcaggccacgccaaccttccaccagtggcgagatgcccgccaggtctacggcttaaactttgcaagtaaagaagaggcaaccacgttctccaatgcaatgctgtttgccctgaacatcatgaattcccaagaaggaggcccctccagccagcgtcaggtgcagaatggcccctctcctgatgagatggacatccagagaagacaagtgatggagcagcaccagcagcagcgtcaggaatctctagaaagaagaacctcggccacagggcccatcctcccaccaggacatccttcatctgcagccagcgcccccgtctcatgtagtgggcctccaccgccccccccacccccagtcccacctccacccactggggctaccccacctcccccacccccactgccagccggaggagcccaggggtccagccacgacgagagctccatgtcaggactggccgctgccatagctggggccaagctgagaagagtccaacggccagaagacgcatctggaggctccagtcccagtgggacctcaaagtccgatgccaaccgggcaagcagcgggggtggcggaggaggcctcatggaggaaatgaacaaactgctggccaagaggagaaaagcagcctcccagtcagacaagccagccgagaagaaggaagatgaaagccaaatggaagatcctagtacctccccctctccggggacccgagcagccagccagccacctaactcctcagaggctggccggaagccctgggagcggagcaactcggtggagaagcctgtgtcctcgattctgtccagaaccccgtctgtggcaaagagccccgaagctaagagcccccttcagtcgcagcctcactctaggatgaagcctgctgggagcgtgaatgacatggccctggatgccttcgacttggaccggatgaagcaggagatcctagaggaggtggtgagagagctccacaaggtgaaggaggagatcatcgacgccatcaggcaggagctgagtgggatcagcaccacgtaa

SEQ ID NO: 889 - DNA, 936 bp, Homo Sapiens
atggccgaggcgtcgccgcatcccggacggtacttctgccactgctgctccgtggagatcgtcccgcgcctgccggattatatctgtccaagatgcgagtctggttttatcgaggagcttccggaagagaccaggagcacagaaaatggttctgccccctccacagctcccacagaccagagccggccaccgttggagcacgtggaccagcacctgttcacgctgccgcagggctacggacagtttgctttcggcatcttcgatgacagcttcgagatccccacgttccctcctggggcgcaggctgacgacggcagggaccctgagagccggcgggagagagaccatccgtcccggcaccggtacggcgcccgacagccccgcgcccgcctcaccacgcggcgggccaccggccggcacgaaggcgtccccacgctggaagggatcatccagcagctcgtcaacggcatcatcacgcccgccaccatccccagcctgggcccctggggagtcctgcactcaaaccctatggactacgcctggggggccaacggcctggatgccatcatcacacagctcctcaatcagtttgaaaacacaggccccccaccggcagataaagagaaaatccaggccctccccaccgtccccgtcactgaggagcacgtaggctccgggctcgagtgccctgtgtgcaaggacgactacgcgctgggtgagcgtgtgcggcagctgccctgcaaccacctgttccacgacggctgcatcgtgccctggctggagcagcacgacagctgccccgtctgccgaaaaagcctcacgggacagaacacggccacgaacccccctggcctcactggggtgagcttctcctcctcgtcgtcatcgtcctcctccagctcgcccagcaacgagaacgccacaagcaactcgtga

SEQ ID NO: 890 - DNA, 2442 bp, Homo Sapiens
gaccccgagacccccagtgacgccgcagccatggagagcggcccgcgtgcggagctgggggcgggcgcacccccagctgtggtcgccaggacccccccagagccaagaccttctccagaaggtgacccttcccccccaccaccaccaatgtcagccctggtccccgacactcccccggacacccctcctgccatgaagaatgccactagctctaagcagctcccactggaaccagagagcccctcagggcaggtcgggcctaggccagcccccccgcaggaagagtccccttcctctgaagcaaagagcagaggacccaccccaccagccatgggcccacgggatgccagacctcctcgaaggagcagccagccatctccaacagcagtgccagcctccgacagccctcccaccaagcaagaggtgaagaaggcaggagagagacacaagctggcaaaggagcggcgagaagagcgggccaagtacctggcggccaagaaggcagtgtggctggagaaggaggagaaggccaaggcgctgcgggagaagcagctccaggagcgccggcgccggctggaggagcaacgtcttaaagccgagcaacgccgtgcagccctggaggaacggcagcggcagaagctcgagaaaaacaaggagcgctatgaagcagccatccaacggtcagtgaagaagacgtgggccgaaatccggcagcagcgctggtcctgggcaggggccctgcaccacagctctccaggacataagaccaatcgcagcctgcagctgagcgcatgggagagcagcatcgtggatcgtctgatgacgcccactctctccttccttgctcggagtcgcagcgcggtcacactgccccgcaacggccgggaccagggtaggggctgcgaccctgggagaggccccacgtggggccgggcaggggccagcctggcgcgcgggccgcaacccgaccgcactcatccctctgcagccgtgccggtgtgcccgcgctcggcctccgccagccccctgacgccgtgcagcgtcacccgaagcgtgcaccgctgcgcccccgccggtgagcgcggggagcgccgcaagcccaacgccgggggcagccccgctccggtgcgccgccggccggaggcctcgccggtgcagaaaaaggagaagaaggacaaggagcgggaaaacgagaaggagaagagtgccctagcccgggagcgcagcctcaagaagcgccagtcgctgcccgcctccccacgtgcccgcctctccgccagcaccgcctctgagctcagccccaaatccaaggccaggccatcctctccctccacatcctggcacaggcctgcctccccctgccccagcccagggccaggccacactctgcctccaaagccaccgtccccccgaggcaccactgcatcccccaaggggcgggttcggaggaaggaggaggcaaaggagagccccagcgccgcagggcccgaggacaagagccagagcaagcgcagggccagtaacgagaaggagtcagcagccccagcctcaccggcaccttcgccggcgccctcgcccaccccagccccgccccagaaggagcagccccccgcggagacccctacagacgctgctgtcttgacctcacccccagcccctgctcccccggtgacccctagcaaaccaatggccggcaccacagaccgagaagaagccactcggctcttggctgagaagcggcgccaggcccgggagcagcgggagcgcgaggagcaggagcggaggctgcaggcagaaagggacaagcgaatgcgagaggagcagctggcacgggaggccgaggcccgggcggagcgggaggcggaggcccggaggcgggaggagcaggaggcacgagagaaggcgcaggccgagcaggaggagcaggagcggctgcagaagcagaaagaggaggccgaagctcggtcgcgggaagaggcggagcggcagcgtctggagcgggaaaagcacttccagcagcaggagcaagagcggcaagagcgcagaaagcgtctggaggagatcatgaagaggactcggaagtcagaagtttctgaaaccaagaagcaggacagcaaggaggccaacgccaacggttccagcccagagcctgtgaaagctgtggaggctcggtccccagggctgcagaaggaggctgtgcagaaagaggagcccatcccacaggagcctcagtggagtctcccaagcaaggagttgccagcgtccctggtgaatggcctgcagcctctcccagcacaccaggagaatggcttctccaccaacggaccctctggggacaagagtctgagccgaacaccagagacactcctgccctttgcagaggcagaagccttcctcaagaaagctgtggtgcagtccccgcaggtcacagaagtcctttaa

SEQ ID NO: 891 - DNA, 4980 bp, Homo Sapiens
atggaggcgcccagcggcagcgagcccggcggcgacggggccggggactgcgcccacccggacccccgggcccctggcgccgcggcgcccagctccggccccggcccgtgcgcggccgcccgggagtccgagcgccagctgcgcctccgcctctgcgtcctcaacgagatcttgggcaccgagagggactacgtgggcaccttgcgcttcttgcagtcggcattcctgcatcgcatccggcagaacgtggccgactcagtggagaagggcctcacggaggagaatgtcaaggtcctgttctcgaacatcgaagacatcctggaagttcataaggatttcttggccgccttggagtattgtttacacccggagccgcagtctcagcatgaacttgggaatgttttcttaaaattcaaggacaagttctgcgtgtacgaggagtattgcagcaaccatgagaaagccctgaggctgctggtggagctgaacaagatccctaccgtgcgcgccttccttttgagctgcatgcttctgggaggccggaagaccacggacatccctttggaaggctacctgttgtctccgatccagaggatctgcaagtacccgctcctccttaaggagctggccaagaggactcccggcaagcacccagaccaccccgcggtccagagtgccctgcaggccatgaagaccgtttgctccaacatcaatgagaccaagcggcagatggagaagctggaagccctggagcagctgcagtcccacatcgaaggctgggagggttccaacctcacagacatctgcactcagctcctcctgcaagggactttgttaaagatctctgcgggcaacatccaggaaagggccttcttcctcttcgacaaccttctcgtctactgcaagcggaaatccagggtcaccgggagcaagaagtccaccaagaggaccaaatccatcaacggctccctctacatcttcaggggtcgaatcaacactgaagtcatggaggtggagaatgtggaagatgggacagcggattaccatagcaacggctataccgtcaccaacggctggaagatccacaacacggccaagaataagtggtttgtctgcatggccaagacggcagaggagaagcagaagtggctggatgccatcatccgcgagcgggagcagcgcgagagcctgaagctgggcatggagcgtgatgcctacgtcatgattgcggagaagggggagaagctgtaccacatgatgatgaacaagaaggtgaacctcatcaaggaccgccggagaaagctgagcactgtccccaagtgctttcttggcaatgagttcgttgcctggctcctagaaattggtgaaatcagcaagacggaagaaggagtcaacttgggccaagccctgttggagaatggcatcatccaccatgtttccgacaagcaccagttcaagaatgagcaggtgatgtatcgcttccgctacgacgatggcacctacaaggcccgaagtgagctggaggacatcatgtccaagggtgtgaggctttactgccgtcttcacagcctctacaccccggtgatcaaagaccgtgattaccacctgaagacctacaagtcagtgcttcccgggagcaagctggtggactggctgctggctcagggagactgccagactcgggaggaggcagtggcgctcggcgtgggtctgtgcaacaatggcttcatgcaccacgtgctggagaagagcgagttcagggatgagtcccagtacttccgctttcatgctgacgaggagatggaggggaccagcagcaagaacaaacagcttcgcaacgacttcaagctggtggagaacattctggccaagcgcctgctgatcctgccccaggaggaggactatggctttgacatcgaggagaagaacaaggctgtggtggtgaagtccgtccagaggggctcgctggctgaggtggctggcctgcaggtggggaggaagatctactccatcaatgaggacctggtgttcctgcggccgttttcagaggtggagtccatcctcaaccagtccttctgctcccgccgccctctgcgcctcctggtggccacgaaggccaaagagatcatcaaaatccccgaccagccggacacactgtgcttccagattcgtggagctgccccaccgtacgtctatgctgtggggagaggctctgaggccatggctgcagggctctgtgctggtcagtgcattctgaaggtcaatggcagcaacgtgatgaacgatggtgcccctgaggtcctggagcacttccaggcattccggagtcggcgcgaagaggccctgggcctgtaccagtggatctaccacacccatgaggatgcccaggaagcacgagccagtcaggaggcctccactgaggaccccagtggcgagcaggcccaggaggaagaccaggctgattcagccttcccactgctgtccctgggtccccggctgagcctgtgtgaggacagccccatggtcaccctgactgtggacaacgtgcacctggaacacggcgtggtgtatgagtatgtgagcacggcaggcgtcaggtgccatgtgctggagaagatcgtggagccccgcggctgcttcggcctcaccgccaagatcctcgaggcctttgctgccaatgacagcgtcttcgtggagaactgcaggcggctcatggccctgagcagcgccatcgtgaccatgccccactttgagttccgcaacatctgtgacaccaagctggagagcattggccagaggattgcctgctaccaggagtttgcagcccaactgaagagcagggtcagcccacccttcaaacaagcccccctggagccccacccgctgtgtggcctggacttctgccccaccaattgccacatcaacctcatggaagtgtcctaccccaagaccaccccctcagtgggcaggtccttcagcatccgctttggacgcaaaccctccctcatcggccttgacccggagcaaggccacctgaaccccatgtcgtacacccagcactgcatcaccaccatggctgctccctcctggaagtgcttgcctgctgcagagggtgatccccaaggccagggtctccatgatggcagcttcgggccagccagtgggacccttggtcaggaagaccggggcctcagcttcctactcaagcaggaggaccgtgagatccaggatgcctacctgcagctcttcaccaagctggatgtggccctgaaggagatgaagcaatatgtcacccagatcaacaggctgctgtccaccatcacagagcccacctcgggtgggtcctgcgacgcatccttggctgaggaggcctcctccctgcccctggtcagtgaagagagcgagatggacaggagtgaccatgggggcatcaagaaggtgtgcttcaaggtggccgaggaggaccaggaggactcaggccacgacaccatgagttatcgcgactcctacagcgagtgtaacagcaatcgagactcggtcctgtcctacaccagcgtgagaagtaacagctcctacttgggcagcgacgagatggggtctggagatgagctgccctgtgacatgcggatcccatctgacaagcaggacaagcttcatggctgcctggagcacctctttaaccaggtggactccatcaatgctctcctcaaggggccagtcatgagccgggctttcgaagagaccaagcatttccctatgaaccacagcttacaagagtttaaacagaaagaagagtgtacaatccgtggccggagcctgatccagattagcatccaggaggacccctggaacctccccaactccatcaagaccctggtggacaacattcagagatatgtggaagatgggaagaaccagctgctcctggccttgctgaagtgcacagacacggagctgcagctgcgcagagacgcgatcttctgccaggccctggtggccgccgtgtgcaccttctccgagcagctgctggcggccctgggctaccgctacaacaacaatggcgagtacgaggagagcagccgcgacgccagccgcaagtggctggagcaggtggcggccacgggcgtcctgctgcactgccagtccctgctctcgccagccacagtgaaggaggaacggaccatgctggaggacatctgggtgacgctgtcagagctggacaatgtcaccttctcctttaagcagctggacgagaactatgtggccaacaccaacgtcttctaccacattgagggcagccggcaggcgctgaaggtcatcttctacctcgacagctaccacttctccaagctgccctcccgcctggagggtggggccagcctgaggctgcacacagcgctgttcacgaaagtgctggagaacgtggaggggctgccttctccaggcagccaggccgcggaggatttgcagcaggacatcaacgcgcagtccctggagaaagttcagcagtattaccgcaaactcagggcattttacctggagcggtctaacctgcccacggatgccagcaccacggcggtaaagatagaccagctgatccgccccatcaatgccctggatgagctctgccgcctcatgaagtcctttgtccacccaaagcctggtgctgctgggagtgtgggcgccggcctcatccccatctcctcggagctctgctaccgcctgggggcctgccagatggtcatgtgtggcacaggcatgcagaggagcaccctgagcgtgtccctggagcaggcggccatcttggcacggagccacgggttgctgcccaagtgcatcatgcaggccacggacatcatgcggaagcagggcccaagggtggagattctggccaaaaacctgcgagtcaaggaccagatgccccagggtgctccgcgcctctaccgcctctgccagccgccggtggatggggacctctga

SEQ ID NO: 892 - DNA, 1206 bp, Homo Sapiens
atgtccctgtacgatgacctaggagtggagaccagtgactcaaaaacagaaggctggtccaaaaacttcaaacttctgcagtctcagcttcaggtgaagaaggcagctctcactcaggcaaagagccaaaggacgaaacaaagtacagtcctcgccccagtcattgacctgaagcgaggtggctcctcagatgaccggcaaattgtggacactccaccgcatgtagcagctgggctgaaggatcctgttcccagtgggttttctgcaggggaagttctgattcccttagctgacgaatatgaccctatgtttcctaatgattatgagaaagtagtgaagcgccaaagagaggaacgacagagacagcgggagctggaaagacaaaaggaaatagaagaaagggaaaaaaggcgtaaagacagacatgaagcaagtgggtttgcaaggagaccagatccagattctgatgaagatgaagattatgagcgagagaggaggaaaagaagtatgggcggagctgccattgccccacccacttctctggtagagaaagacaaagagttaccccgagattttccttatgaagaggactcaagacctcgatcacagtcttccaaagcagccattcctcccccagtgtacgaggaacaagacagaccgagatctccaaccggacctagcaactccttcctcgctaacatggggggcacggtggcgcacaagatcatgcagaagtacggcttccgggagggccagggtctggggaagcatgagcagggcctgagcactgccttgtcagtggagaagaccagcaagcgtggcggcaagatcatcgtgggcgacgccacagagaaagatgcatccaagaagtcagattcaaatccgctgactgaaatacttaagtgtcctactaaagtggtcttactaaggaacatggttggtgcgggagaggtggatgaagacttggaagttgaaaccaaggaagaatgtgaaaaatatggcaaagttggaaaatgtgtgatatttgaaattcctggtgcccctgatgatgaagcagtacggatatttttagaatttgagagagttgaatcagcaattaaagcggttgttgacttgaatgggaggtattttggtggacgggtggtaaaagcatgtttctacaatttggacaaattcagggtcttggatttggcagaacaagtttga

SEQ ID NO: 893 - DNA, 1122 bp, Homo Sapiens
atggacaccctggaggaggtgacttgggccaatgggagcacagcgctacccccacccctggcaccaaacatcagtgtgcctcatcgctgcctgctgctgctctacgaagacattggcacctccagggtccggtactgggacctcttgctgctcatccccaatgtgctcttcctcatcttcctgctctggaagcttccatctgctcgggcgaagatccgcatcacctccagccccatttttatcaccttctacatcctggtgtttgtggtggcgctggtgggcattgcccgggccgtggtatccatgacggtgagcacctcgaacgctgcaactgttgctgataagatcctgtgggagatcacccgcttcttcctgctggccatcgagctgagtgtgatcatcctgggcctggcctttggccacctggagagtaagtccagcatcaagcgggtgctggccatcaccacagtgctgtccctggcctactctgtcacccaggggaccctggagatcctgtaccctgatgcccatctctcagctgaggactttaatatctatggccatgggggccgccagttctggctggtcagctcctgcttcttcttcctggtctactctctggtggtcatccttcccaagaccccgctgaaggagcgcatctccctgccttctcggaggagcttctacgtgtatgcgggcatcctggcactgctcaacctactgcaggggctggggagtgtgctgctgtgcttcgacatcatcgaggggctctgctgtgtagatgccacaaccttcctgtacttcagcttcttcgctccgctcatctacgtggctttcctccggggcttcttcggctcggagcccaagatcctcttctcctacaaatgccaagtggacgagacagaggagccagatgtacacctaccccagccctacgctgtggcccggcgggagggcctggaggctgcaggggctgctggggcctcagctgccagctactcgagcacgcagttcgactctgccggcggggtggcctacctggatgacatcgcttccatgccctgccacactggcagcatcaacagcacagacagcgagcgctggaaggccatcaatgcctga

SEQ ID NO: 894 - DNA, 477 bp, Homo Sapiens
atggcggaacaggctaccaagtccgtgctgtttgtgtgtctgggtaacatttgtcgatcacccattgcagaagcagttttcaggaaacttgtaaccgatcaaaacatctcagagaattgggtcattgacagcggtgctgtttctgactggaacgtgggccggtccccagacccaagagctgtgagctgcctaagaaatcatggcattcacacagcccataaagcaagacagattaccaaagaagattttgccacatttgattatatactatgtatggatgaaagcaatctgagagatttgaatagaaaaagtaatcaagttaaaacctgcaaagctaaaattgaactacttgggagctatgatccacaaaaacaacttattattgaagatccctattatgggaatgactctgactttgagacggtgtaccagcagtgtgtcaggtgctgcagagcgttcttggagaaggcccactga

SEQ ID NO: 895 - DNA, 1299 bp, Homo Sapiens
atgtctgacaaactgccctacaaagtcgccgacatcggcctggctgcctggggacgcaaggccctggacattgctgagaacgagatgccgggcctgatgcgtatgcgggagcggtactcggcctccaagccactgaagggcgcccgcatcgctggctgcctgcacatgaccgtggagacggccgtcctcattgagaccctcgtcaccctgggtgctgaggtgcagtggtccagctgcaacatcttctccacccaggaccatgcggcggctgccattgccaaggctggcattccggtgtatgcctggaagggcgaaacggacgaggagtacctgtggtgcattgagcagaccctgtacttcaaggacgggcccctcaacatgattctggacgacgggggcgacctcaccaacctcatccacaccaagtacccgcagcttctgccaggcatccgaggcatctctgaggagaccacgactggggtccacaacctctacaagatgatggccaatgggatcctcaaggtgcctgccatcaatgtcaatgactccgtcaccaagagcaagtttgacaacctctatggctgccgggagtccctcatagatggcatcaagcgggccacagatgtgatgattgccggcaaggtagcggtggtagcaggctatggtgatgtgggcaagggctgtgcccaggccctgcggggtttcggagcccgcgtcatcatcaccgagattgaccccatcaacgcactgcaggctgccatggagggctatgaggtgaccaccatggatgaggcctgtcaggagggcaacatctttgtcaccaccacaggctgtattgacatcatccttggccggcactttgagcagatgaaggatgatgccattgtgtgtaacattggacactttgacgtggagatcgatgtcaagtggctcaacgagaacgccgtggagaaggtgaacatcaagccgcaggtggaccggtatcggttgaagaatgggcgccgcatcatcctgctggccgagggtcggctggtcaacctgggttgtgccatgggccaccccagcttcgtgatgagtaactccttcaccaaccaggtgatggcgcagatcgagctgtggacccatccagacaagtaccccgttggggttcatttcctgcccaagaagctggatgaggcagtggctgaagcccacctgggcaagctgaatgtgaagttgaccaagctaactgagaagcaagcccagtacctgggcatgtcctgtgatggccccttcaagccggatcactaccgctactga

SEQ ID NO: 896 - DNA, 1677 bp, Homo Sapiens
atggccgctctcacccgggacccccagttccagaagctgcagcaatggtaccgcgagcaccgctccgagctgaacctgcgccgcctcttcgatgccaacaaggaccgcttcaaccacttcagcttgaccctcaacaccaaccatgggcatatcctggtggattactccaagaacctggtgacggaggacgtgatgcggatgctggtggacttggccaagtccaggggcgtggaggccgcccgggagcggatgttcaatggtgagaagatcaactacaccgagggtcgagccgtgctgcacgtggctctgcggaaccggtcaaacacacccatcctggtagacggcaaggatgtgatgccagaggtcaacaaggttctggacaagatgaagtctttctgccagcgtgtccggagcggtgactggaaggggtacacaggcaagaccatcacggacgtcatcaacattggcattggcggctccgacctgggacccctcatggtgactgaagcccttaagccatactcttcaggaggtccccgcgtctggtatgtctccaacattgatggaactcacattgccaaaaccctggcccagctgaaccccgagtcctccctgttcatcattgcctccaagacctttactacccaggagaccatcacgaatgcagagacggcgaaggagtggtttctccaggcggccaaggatccttctgcagtggcgaagcactttgttgccctgtctactaacacaaccaaagtgaaggagtttggaattgaccctcaaaacatgttcgagttctgggattgggtgggaggacgctactcgctgtggtcggccatcggactctccattgccctgcacgtgggttttgacaacttcgagcagctgctctcgggggctcactggatggaccagcacttccgcacgacgcccctggagaagaacgcccccgtcttgctggccctgctgggtatctggtacatcaactgctttgggtgtgagacacacgccatgctgccctatgaccagtacctgcaccgctttgctgcgtacttccagcagggcgacatggagtccaatgggaaatacatcaccaaatctggaacccgtgtggaccaccagacaggccccattgtgtggggggagccagggaccaatggccagcatgctttttaccagctcatccaccaaggcaccaagatgataccctgtgacttcctcatcccggtccagacccagcaccccatacggaagggtctgcatcacaagatcctcctggccaacttcttggcccagacagaggccctgatgaggggaaaatcgacggaggaggcccgaaaggagctccaggctgcgggcaagagtccagaggaccttgagaggctgctgccacataaggtctttgaaggaaatcgcccaaccaactctattgtgttcaccaagctcacaccattcatgcttggagccttggtcgccatgtatgagcacaagatcttcgttcagggcatcatctgggacatcaacagctttgaccagtggggagtggagctgggaaagcagctggctaagaaaatagagcctgagcttgatggcagtgctcaagtgacctctcacgacgcttctaccaatgggctcatcaacttcatcaagcagcagcgcgaggccagagtccaataa

SEQ ID NO: 897 - DNA, 951 bp, Homo Sapiens
atggcgtctaccagccgtttggatgctcttccaagagtcacatgtccaaaccatccagatgcgattttagtggaggactacagagccggtgatatgatctgtcctgaatgtggcttggttgtaggtgaccgggttattgatgtgggatctgaatggcgaactttcagcaatgacaaagcaacaaaagatccatctcgagttggagattctcagaatcctcttctgagtgatggagatttgtctaccatgattggcaagggcacaggagctgcaagttttgacgaatttggcaattctaagtaccagaatcggagaacaatgagcagttctgatcgggcaatgatgaatgcattcaaagaaatcactaccatggcagacagaatcaatctacctcgaaatatagttgatcgaacaaataatttattcaagcaagtatatgaacagaagagcctgaagggaagagctaatgatgctatagcttctgcttgtctctatattgcctgtagacaagaaggggttcctaggacatttaaagaaatatgtgccgtatcacgaatttctaagaaagaaattggtcggtgttttaaacttattttgaaagcgctagaaaccagtgtggatttgattacaactggggacttcatgtccaggttctgttccaacctttgtcttcctaaacaagtacagatggcagctacacatatagcccgtaaagctgtggaattggacttggttcctgggaggagccccatctctgtggcagcggcagctatttacatggcctcacaggcatcagctgaaaagaggacccaaaaagaaattggagatattgctggtgttgctgatgttacaatcagacagtcctatagactgatctatcctcgagccccagatctgtttcctacagacttcaaatttgacaccccagtggacaaactaccacagctataa

SEQ ID NO: 898 - DNA, 951 bp, Homo Sapiens
atgtcagcggaagtggaaacctcagagggggtagacgagtcagaaaaaaagaactctggggccctagaaaaggagaaccaaatgagaatggctgacctctcggagctcctgaaggaagggaccaaggaagcacacgaccgggcagaaaacacccagtttgtcaaggacttcttgaaaggcaacattaagaaggagctgtttaagctggccaccacggcactttacttcacatactcagccctcgaggaggaaatggagcgcaacaaggaccatccagcctttgcccctttgtacttccccatggagctgcaccggaaggaggcgctgaccaaggacatggagtatttctttggtgaaaactgggaggagcaggtgcagtgccccaaggctgcccagaagtacgtggagcggatccactacatagggcagaacgagccggagctactggtggcccatgcatacacccgctacatgggggatctctcggggggccaggtgctgaagaaggtggcccagcgagcactgaaactccccagcacaggggaagggacccagttctacctgtttgagaatgtggacaatgcccagcagttcaagcagctctaccgggccaggatgaacgccctggacctgaacatgaagaccaaagagaggatcgtggaggaggccaacaaggcttttgagtataacatgcagatattcaatgaactggaccaggccggctccacactggccagagagaccttggaggatgggttccctgtacacgatgggaaaggagacatgcgtaaatgccctttctacgctgctgaacaagacaaaggtgccctggagggcagcagctgtcccttccgaacagctatggctgtgctgaggaagcccagcctccagttcatcctggccgctggtgtggccctagctgctggactcttggcctggtactacatgtga

SEQ ID NO: 899 - DNA, 2922 bp, Homo Sapiens
atgattggtcgctgctttgtgctcagccaggacctggccatccgggatgagttggatggtggggaatggaagttctgtgagggacgcccccaaggccatgaacaatttgggttctgccagcagggcacagctgccgccttctcccctgatagccactacctcctctttggggccccaggaacctataattggaaggggttgctttttgtgaccaacattgatagctcagaccccgaccagctggtgtataaaactttggaccctgctgaccggctcccaggaccagccggagacttggccctcaatagctacttaggcttctctattgactcggggaaaggtctggtgcgtgcagaagagctgagctttgtggctggagccccccgcgccaaccacaagggtgctgtggtcatcctgcgcaaggacagcgccagtcgcctggtgcccgaggttatgctgtctggggagcgcctgacctccggctttggctactcactggctgtggctgacctcaacagtgatggctggccagacctgatagtgggtgccccctacttctttgagcgccaagaagagctggggggtgctgtgtatgtgtacttgaaccaggggggtcactgggctgggatctcccctctccggctctgcggctcccctgactccatgttcgggatcagcctggctgtcctgggggacctcaaccaagatggctttccagatattgcagtgggtgccccctttgatggtgatgggaaagtcttcacctaccatgggagcagcctgggggttgtcgccaaaccttcacaggtgctggagggcgaggctgtgggcatcaagagcttcggctactccctgtcaggcagcttggatatggatgggaaccaataccctgacctgctggtgggctccctggctgacaccgcagtgctcttcagggccagacccatcctccatgtctcccatgaggtctctattgctccacgaagcatcgacctggagcagcccaactgtgctggcggccactcggtctgtgtggacctaagggtctgtttcagctacattgcagtccccagcagctatagccctactgtggatgcggacacagaccggaggctccggggccaggttccccgtgtgacgttcctgagccgtaacctggaagaacccaagcaccaggcctcgggcaccgtgtggctgaagcaccagcatgaccgagtctgtggagacgccatgttccagctccaggaaaatgtcaaagacaagcttcgggccattgtagtgaccttgtcctacagtctccagacccctcggctccggcgacaggctcctggccaggggctgcctccagtggcccccatcctcaatgcccaccagcccagcacccagcgggcagagatccacttcctgaagcaaggctgtggtgaagacaagatctgccagagcaatctgcagctggtccgcgcccgcttctgtacccgggtcagcgacacggaattccaacctctgcccatggatgtggatggaacaacagccctgtttgcactgagtgggcagccagtcattggcctggagctgatggtcaccaacctgccatcggacccagcccagccccaggctgatggggatgatgcccatgaagcccagctcctggtcatgcttcctgactcactgcactactcaggggtccgggccctggaccctgcggagaagccactctgcctgtccaatgagaatgcctcccatgttgagtgtgagctggggaaccccatgaagagaggtgcccaggtcaccttctacctcatccttagcacctccgggatcagcattgagaccacggaactggaggtagagctgctgttggccacgatcagtgagcaggagctgcatccagtctctgcacgagcccgtgtcttcattgagctgccactgtccattgcaggaatggccattccccagcaactcttcttctctggtgtggtgaggggcgagagagccatgcagtctgagcgggatgtgggcagcaaggtcaagtatgaggtcacggtttccaaccaaggccagtcgctcagaaccctgggctctgccttcctcaacatcatgtggcctcatgagattgccaatgggaagtggttgctgtacccaatgcaggttgagctggagggcgggcaggggcctgggcagaaagggctttgctctcccaggcccaacatcctccacctggatgtggacagtagggataggaggcggcgggagctggagccacctgagcagcaggagcctggtgagcggcaggagcccagcatgtcctggtggccagtgtcctctgctgagaagaagaaaaacatcaccctggactgcgcccggggcacggccaactgtgtggtgttcagctgcccactctacagctttgaccgcgcggctgtgctgcatgtctggggccgtctctggaacagcacctttctggaggagtactcagctgtgaagtccctggaagtgattgtccgggccaacatcacagtgaagtcctccataaagaacttgatgctccgagatgcctccacagtgatcccagtgatggtatacttggaccccatggctgtggtggcagaaggagtgccctggtgggtcatcctcctggctgtactggctgggctgctggtgctagcactgctggtgctgctcctgtggaagatgggattcttcaaacgggcgaagcaccccgaggccaccgtgccccagtaccatgcggtgaagattcctcgggaagaccgacagcagttcaaggaggagaagacgggcaccatcctgaggaacaactggggcagcccccggcaggagggcccggatgcacaccccatcctggctgctgacgggcatcccgagctgggccccgatgggcatccagggccaggcaccgcctag

SEQ ID NO: 900 - DNA, 2631 bp, Homo Sapiens
atggagctgatcaccattctcgagaagaccgtgtctcccgatcggctggagctggaagcggcgcagaagttcctggagcgtgcggccgtggagaacctgcccactttccttgtggaactgtccagagtgctggcaaatccaggaaacagtcaggttgccagagttgcagctggtctacaaatcaagaactctttgacatctaaagatccagatatcaaggcacaatatcagcagaggtggcttgctattgatgctaatgctcgacgagaagtcaagaactatgttttgcagacattgggtacagaaacttaccggcctagttctgcctcacagtgtgtggctggtattgcttgtgcagagatcccagtaaaccagtggccagaactcattcctcagctggtggccaatgtcacaaaccccaacagcacagagcacatgaaggagtcgacattggaagccatcggttatatttgccaagatatagacccagagcagctacaagataaatccaatgagattctgactgccataatccaggggatgaggaaagaagagcctagtaataatgtgaagctagctgctacgaatgcactcctgaactcattggagttcaccaaagcaaactttgataaagagtctgaaaggcactttattatgcaggtggtctgtgaagccacacagtgtccagatacgagggtacgagtggctgctttacagaatctggtgaagataatgtccttatattatcagtacatggagacatatatgggtcctgctctttttgcaatcacaatcgaagcaatgaaaagtgacattgatgaggtggctttacaagggatagaattctggtccaatgtctgtgatgaggaaatggatttggccattgaagcttcagaggcagcagaacaaggacggccccctgagcacaccagcaagttttatgcgaagggagcactacagtatctggttccaatcctcacacagacactaactaaacaggacgaaaatgatgatgacgatgactggaacccctgcaaagcagcaggggtgtgcctcatgcttctggccacctgctgtgaagatgacattgtcccacatgtcctccccttcattaaagaacacatcaagaacccagattggcggtaccgggatgcagcagtgatggcttttggttgtatcttggaaggaccagagcccagtcagctcaaaccactagttatacaggctatgcccaccctaatagaattaatgaaagaccccagtgtagttgttcgagatacagctgcatggactgtaggcagaatttgtgagctgcttcctgaagctgccatcaatgatgtctacttggctcccctgctacagtgtctgattgagggtctcagtgctgaacccagagtggcttcaaatgtgtgctgggctttctccagtctggctgaagctgcttatgaagctgcagacgttgctgatgatcaggaagaaccagctacttactgcttatcttcttcatttgaactcatagttcagaagctcctagagactacagacagacctgatggacaccagaacaacctgaggagttctgcatatgaatctctgatggaaattgtgaaaaacagtgccaaggattgttatcctgctgtccagaaaacgactttggtcatcatggaacgactgcaacaggttcttcagatggagtcacatatccagagcacatccgatagaatccagttcaatgaccttcagtctttactctgtgcaactcttcagaatgttcttcggaaagtgcaacatcaagatgctttgcagatctctgatgtggttatggcctccctgttaaggatgttccaaagcacagctgggtctgggggagtacaagaggatgccctgatggcagttagcacactggtggaagtgttgggtggtgaattcctcaagtacatggaggcctttaaacccttcctgggcattggattaaaaaattatgctgaataccaggtttgtttggcagctgtgggcttagtgggagacttgtgccgtgccctgcaatccaacatcatacctttctgtgacgaggtgatgcagctgcttctggaaaatttggggaatgagaacgtccacaggtctgtgaagccgcagattctgtcagtgtttggtgatattgcccttgctattggaggagagtttaaaaaatacttagaggttgtattgaatactcttcagcaggcctcccaagcccaggtggacaagtcagactatgacatggtggattatctgaatgagctaagggaaagctgcttggaagcctatactggaatcgtccagggattaaagggggatcaggagaacgtacacccggatgtgatgctggtacaacccagagtagaatttattctgtctttcattgaccacattgctggagatgaggatcacacagatggagtagtagcttgtgctgctggactaataggggacttatgtacagcatttgggaaggatgtactgaaattagtagaagctaggccaatgatccatgaattgttaactgaagggcggagatcgaagactaacaaagcaaaaacccttgctacatgggcaacaaaagaactgaggaaactgaagaaccaagcttga

SEQ ID NO: 901 - DNA, 1053 bp, Homo Sapiens
atgttcattaagggcagggctccgagggcgccacctcgagagcgacggcgggctacccggggcgggctgaggcaggttgtagccccgccccgggccttgggctccacctctcggccccacttccgccgggcaagcgtttgtaggcggcgctgccgtaaatcaggcggtctgcttgccgcatcacgcaagatggcggccgcggcggtgaacggggcggcaggcttctcgagctccgggcccgcggcaacctcgggcgctgttctgcaggccgcgaccggcatgtacgagcaactcaagggcgagtggaaccgtaaaagccccaatcttagcaagtgcggggaagagctgggtcgactcaagctagttcttctggagctcaacttcttgccaaccacagggaccaagctgaccaaacagcagctaattctggcccgtgacatactggagatcggggcccaatggagcatcctacgcaaggacatcccctccttcgagcgctacatggcccagctcaaatgctactactttgattacaaggagcagctccccgagtcagcctatatgcaccagctcttgggcctcaacctcctcttcctgctgtcccagaaccgggtggctgagttccacacggagttggagcggctgcctgccaaggacatacagaccaatgtctacatcaagcacccagtgtccctggagcaatacctgatggagggcagctacaacaaagtgttcctggccaagggtaacatccccgccgagagctacaccttcttcattgacatcctgctcgacactatcagggatgagatcgctgggtgcatcgagaaggcctacgagaaaatccttttcactgaggccacccggatcctcttcttcaacacacccaaaaagatgacagactacgccaagaagcgagggtgggtcctgggccccaacaactactacagttttgccagccagcagcagaagccggaagacaccaccattccctccacagaactggccaaacaggtcatcgagtatgcccggcagctggagatgatcgtctga

SEQ ID NO: 902 - DNA, 7419 bp, Homo Sapiens
atggacccaagtggggtcaaagtgctggaaacagcagaggacatccaggagaggcggcagcaggtcctagaccgataccaccgcttcaaggaactctcaacccttaggcgtcagaagctggaagattcctatcgattccagttctttcaaagagatgctgaagagctggagaaatggatacaggaaaaacttcagattgcatctgatgagaattataaagacccaaccaacttgcagggaaagcttcagaagcatcaagcatttgaagctgaagtgcaggccaactcaggagccattgttaagctggatgaaactggaaacctgatgatctcagaagggcattttgcatctgaaaccatacggacccgtttgatggagctgcaccgccagtgggaattacttttggagaagatgcgagaaaaaggaatcaaactgctgcaggcccagaagttggtgcagtacttacgagaatgtgaggacgtgatggactggatcaatgacaaggaagcaattgttacttctgaagagctgggccaggatctggagcatgtagaggttttacagaagaaatttgaagagtttcaaacagatatggctgctcatgaagaaagagttaatgaagtgaaccagtttgctgccaaactcatacaggagcagcaccctgaggaggaactgatcaagactaagcaggatgaagtcaatgcagcctggcagcggctgaagggcctggctctgcagaggcaggggaagctctttggggcagcagaagttcagcgctttaacagggatgtggatgagactatcagttggattaaggaaaaggagcagttaatggcctctgatgattttggccgagacctggcaagtgttcaggctctgcttcggaagcacgagggtctggagagagatcttgctgctctagaagacaaggtcaaagccctgtgtgctgaggctgaccgcctgcaacagtcccaccctctgagtgcaacacagattcaagtgaagcgagaggaactgattacaaactgggagcagatccgcaccttggcggcagagagacatgcacggctcaatgattcatacaggcttcaacgcttccttgctgacttccgtgacctcaccagctgggtgactgagatgaaagccctcatcaatgcagatgagcttgccagtgatgtggctggggctgaagccctgctagatagacaccaagagcacaagggtgaaattgatgcccatgaagacagcttcaaatctgcagatgaatctggacaggcactgcttgctgctggtcactatgcctcagatgaagtgagggagaagctgaccgtcctttccgaggagagagcggcgctgctggagctgtgggagctgcgcaggcagcagtacgagcagtgcatggacctgcagctcttctaccgggacactgagcaggtggacaactggatgagcaagcaggaggcgttcctgttgaatgaagacttgggagattccttggatagtgtggaagcgcttcttaagaagcacgaagactttgagaaatcccttagtgcccaggaggaaaagattacagcattagatgaatttgcaaccaagctaattcagaacaaccactatgcaatggaagatgtggccactcgccgagatgctctgttgagccgccgcaatgcccttcacgagagagccatgcgtcgccgggcccagctagccgattctttccatctgcagcagtttttccgtgattctgatgagctcaagagttgggtcaatgagaagatgaaaactgccacagatgaagcttataaagatccatccaacctacaaggaaaagtacagaagcatcaggcttttgaggctgagctctcagcaaaccagagccgaattgatgccttggagaaagctggccaaaagctgattgatgtcaaccactatgccaaggatgaagtggcagctcgtatgaatgaggtgatcagtttgtggaagaaactgctagaggccactgaactgaaaggaataaagcttcgtgaagccaaccagcaacagcaatttaatcgcaatgttgaggatattgaattgtggctatatgaagtagaaggtcacttggcttcggatgattacggcaaagatcttaccaatgtgcagaacctccagaagaaacatgccctgctagaggcagatgtggctgctcaccaggaccgaattgatggcatcaccattcaggcccgccagttccaagatgctggccattttgatgcagaaaacatcaagaagaaacaggaagccctcgtggctcgctatgaggcactcaaggagcccatggttgcccggaagcagaagctggccgattctctgcggttgcagcagctcttccgggatgttgaggatgaggagacgtggattcgagagaaagagcccattgccgcatctaccaacagaggtaaggatttaattggggtccagaatctgctaaagaaacatcaagccttacaagcagaaattgctggacatgaaccacgcatcaaagcagttacacagaaggggaatgccatggtggaggaaggccattttgctgcagaggatgtgaaggccaagcttcacgagctgaaccaaaagtgggaggcactgaaagccaaagcttcccagcgtcggcaggacctggaggactctctgcaggcccagcagtactttgctgatgctaacgaggctgaatcctggatgcgggagaaggaacccattgtgggcagcactgactatggcaaggacgaagactctgctgaggctctactgaagaaacacgaagctttgatgtcagatctcagtgcctacggcagcagcatccaggctttgcgagaacaagcacagtcctgccggcaacaagtggcccccacggatgatgagactgggaaggagctggtcttggctctctacgactatcaggagaagagtccccgagaggtcaccatgaagaagggagatatccttaccttactcaacagcaccaacaaggattggtggaaagtggaagtgaacgatcgtcagggttttgtgccggctgcgtacgtgaagaaattggaccccgcccagtcagcctcccgggagaatctcctggaggagcaaggcagcatagcactgcggcaggagcagattgacaatcagacacgcataactaaggaggccggcagtgtatctctgcgtatgaagcaggtggaagaactatatcattctctgctggaactgggtgagaagcgtaaaggcatgttggagaagagttgcaagaagtttatgttgttccgtgaagcgaatgaactacagcaatggatcaatgagaaggaagccgctctgacaagtgaggaggtcggagcagacttggagcaggttgaggtgctccagaagaagtttgatgacttccagaaggacctgaaggccaatgagtcacggttgaaggacattaacaaggtagctgaagacctggagtctgaaggtctcatggcagaggaggtgcaggctgtgcaacaacaggaagtgtatggcatgatgcccagggatgaaactgattccaagacagcctccccgtggaagtctgctcgtctgatggttcacaccgtggccacctttaattccatcaaggagctgaatgagcgctggcggtccctacagcagctggccgaggaacggagccagctcttgggcagcgcccatgaagtacagaggttccacagagatgctgatgaaaccaaagaatggattgaagagaagaatcaagctctaaacacagacaattatggacatgatctcgccagtgtccaggccctgcaacgcaagcatgagggcttcgagagggaccttgcggctctcggtgacaaggtaaactcccttggtgaaacagcagagcgcctgatccagtcccatcccgagtcagcagaagacctgcaggaaaagtgcacagagttaaaccaggcctggagcagcctggggaaacgtgcagatcagcgcaaggcaaagttgggtgactcccacgacctgcagcgcttccttagcgatttccgggacctcatgtcttggatcaatggaatacgggggttggtgtcctcagatgagctagccaaggatgtcaccggagctgaggcattgctggagcgacaccaggaacaccggacagaaatcgatgccagggctggcactttccaggcatttgagcagtttggacagcagctgttggctcacggacactatgccagccctgagatcaagcagaaacttgatattcttgaccaggagcgtgcagacctggagaaggcctgggttcagcgcaggatgatgctggatcagtgccttgaactgcagctgttccatcgggactgtgagcaagctgagaactggatggctgcccgggaggccttcttgaataccgaagacaaaggagactcactggacagcgtagaggctctgatcaaaaaacatgaagactttgacaaagcgattaacgtccaggaagagaagattgctgctctgcaggcctttgccgaccagctcatcgctgccggccattatgccaagggagacatttctagccggcgcaatgaggtcttggacaggtggcgacgtctgaaagcccagatgattgagaaaaggtcaaagctaggagaatctcaaaccctccaacagttcagccgggatgtggatgagattgaggcttggatcagtgaaaaattgcaaacagcgagtgatgagtcgtacaaggatcccaccaacatccagagcaagcaccagaagcaccaggcttttgaagcagagctgcatgccaacgctgaccggatccgtggggttatcgacatgggcaactccctcattgaacgtggagcctgtgccggcagtgaggatgctgtcaaggcccgcctggctgccttagctgaccagtggcagttcttggtgcaaaagtcagcggaaaagagccagaaactgaaagaagccaacaagcagcagaacttcaacacagggatcaaggactttgacttctggctgtctgaggtggaggccctgctggcatccgaagattatggcaaagacctggcttctgtgaacaacctgctgaaaaagcatcaactgctggaagcagatatatctgcccatgaggatcgcctgaaggacctgaacagccaggcagacagcctgatgaccagcagtgccttcgacacctcccaagtaaaggacaagagggacaccatcaacgggcgcttccagaagatcaagagcatggcggcctcccggcgagccaagctgaatgaatcccatcgcctgcaccagttcttccgggacatggatgacgaggagtcctggatcaaggagaagaagctgctggtgggctcagaggactacggccgggacctaaccggcgtgcagaacctgaggaagaagcacaagcggctggaagcagaactggctgcgcatgagccggctattcagggtgtcctggacactggcaagaagctgtccgatgacaacaccatcgggaaagaggagatccagcagcggctggcgcagtttgtggagcactggaaagagctgaagcagctggcagctgcccggggtcagcggctggaagagtccttggaatatcagcagtttgtagccaatgtggaagaggaagaagcctggatcaatgagaaaatgaccctggtggccagcgaagattatggcgacactcttgccgccatccagggcttactgaagaaacatgaagcttttgagacagacttcaccgtccacaaggatcgcgtgaatgatgtctgcaccaatggacaagacctcattaagaagaacaatcaccatgaggagaacatctcttcaaagatgaagggcctgaacgggaaagtgtcagacctggagaaagctgcagcccagagaaaggcgaagctggatgagaactcggccttccttcagttcaactggaaggcggacgtggtggagtcctggatcggtgaaaaggagaacagcttgaagacagatgattatggccgagacctgtcttctgtgcagacgctcctcaccaaacaggaaacttttgacgctgggctgcaggccttccagcaggaaggcattgccaacatcactgccctcaaagatcagcttctcgccgccaaacacgttcagtccaaggccatcgaggcccggcacgcctccctcatgaagaggtggagccagcttctggccaactcagccgcccgcaagaagaagcttctggaggctcagagtcacttccgcaaggtggaggacctcttcctgaccttcgccaaaaaggcttctgccttcaacagctggtttgaaaatgcagaggaggacttaacagaccccgtgcgctgcaactccttggaagaaatcaaagctttgcgcgaggcccacgacgccttccgctcctccctcagctctgcccaggctgacttcaaccagctggccgagctggaccgccagatcaagagcttccgcgtagcctccaacccctacacctggtttaccatggaggccctggaggagacctggaggaacctacagaaaatcatcaaggagagggagctggagctgcagaaggaacagcggcggcaggaggagaacgacaagctgcgccaggagtttgcccagcacgccaacgccttccaccagtggatccaagagaccaggacatacctcctcgatgggtcctgtatggtggaagagtcggggaccctcgaatcccagcttgaagctaccaaacgcaagcaccaggaaatccgagccatgagaagtcagctcaaaaagatcgaggacctgggggccgccatggaggaggccctcatcctggacaacaagtacacggagcacagcaccgtgggcctcgcccagcagtgggaccagctggaccagctgggcatgcgcatgcagcacaacctggagcagcagatccaggccaggaacacaacaggtgtgactgaggaggccctcaaagaattcagcatgatgtttaaacactttgacaaggacaagtctggcaggctgaaccatcaggagttcaaatcttgcctgcgctccctgggctatgacctgcccatggtggaggaaggggaacctgaccctgagttcgaggcaatcctggacacggtggatccgaacagagatggccatgtctccttgcaagaatacatggctttcatgatcagccgcgaaactgagaacgtcaagtccagcgaggagattgagagcgccttccgggccctcagctcagagggaaagccttacgtgaccaaggaggagctctaccagaacctgacccgggaacaagccgactactgcgtctcccacatgaagccctacgtggacggcaagggccgcgagctccccaccgcgttcgactacgtggagttcacccgctcgcttttcgtgaactga

SEQ ID NO: 903 - DNA, 900 bp, Homo Sapiens
atgatgggcaaggaagaggagattgcgcggatcgcccggaggctggacaagatggtgaccaagaagagcgcggagggagccatggatttgctgcgggagctgaaggccatgcctatcacgctgcacctgctccagtccacccgagtcgggatgtctgtcaacgcccttcggaagcagagctcggatgaggaggtcattgcactggccaagtctctcatcaagtcctggaagaagctcctggatgcttccgatgccaaagccagggagcgggggaggggcatgcctctgcccacgtcctcgagggatgcctcagaggccccggatcccagccgcaagaggccggagctgcccagggcaccgtcgactccgaggatcaccacatttcctccggtgcctgtcacctgtgatgccgtgcgcaacaagtgccgcgagatgctgaccgctgccctgcagacggaccatgaccacgtggccatcggtgcggactgcgagcgcctgtcggctcagatcgaggaatgcatcttccgggacgttggaaacacagacatgaagtataagaaccgtgtacggagtcgtatctccaacctgaaggatgccaagaaccctgacctgcggcggaatgtgctgtgtggggccataacaccccagcagatcgctgtgatgacctcagaggagatggccagtgatgagctgaaggagatccgtaaggccatgaccaaggaggccatccgagagcaccagatggcccgcactggcggcacgcagacagacctgttcacctgcggcaagtgcaggaaaaagaactgcacctacacacaggtgcagacccgcagctctgatgagcccatgaccacctttgttgtctgcaacgagtgtggaaaccgctggaagttctgctga

SEQ ID NO: 904 - DNA, 519 bp, Homo Sapiens
atgattatctaccgggacctcatcagccacgatgagatgttctccgacatctacaagatccgggagatcgcggacgggttgtgcctggaggtggaggggaagatggtcagtaggacagaaggtaacattgatgactcgctcattggtggaaatgcctccgctgaaggccccgagggcgaaggtaccgaaagcacagtaatcactggtgtcgatattgtcatgaaccatcacctgcaggaaacaagtttcacaaaagaagcctacaagaagtacatcaaagattacatgaaatcaatcaaagggaaacttgaagaacagagaccagaaagagtaaaaccttttatgacaggggctgcagaacaaatcaagcacatccttgctaatttcaaaaactaccagttctttattggtgaaaacatgaatccagatggcatggttgctctattggactaccgtgaggatggtgtgaccccatatatgattttctttaaggatggtttagaaatggaaaaatgttaa

SEQ ID NO: 905 - DNA, 1671 bp, Homo Sapiens
atggcgcgggagaaggagatgcaggagttcacccgtagcttcttccgaggccgcccggacctcagcacgcttacgcattccatcgtgcggcggaggtacttagctcactcgggccgcagccacctggagcccgaggagaagcaggcactgaagcggctggtggaggaggagctgctgaagatgcaggtggatgaagccgcttccagggaagacaaactggaccttaccaagaagggcaagaggcctcccaccccttgtagcgacccggagagaaaaaggttccgcttcaattcagagtcggagtccggctctgaagcctccagcccagactactttggacccccagcaaagaatggggtggcagcagaagtcagcccagccaaagaggagaatccaaggcgagcctcaaaggcagttgaggagagcagtgatgaggaacggcagagggacctgcccgcacagaggggagaggagagcagtgaggaggaggaaaaggggtacaaggggaagactaggaagaaacctgtggtaaagaagcaggcaccaggcaaggcctcagtcagtaggaagcaggccagggaagaaagtgaggagagcgaggcagaacccgttcagaggacagcaaagaaggtggagggaaataaaggaactaaaagcctgaaggaaagtgaacaggagagtgaagaggagatcctagcccagaagaaagagcagagagaggaggaagtggaggaggaagagaaagaagaggatgaggaaaagggggattggaaacccagaaccaggagcaatggccggagaaagtcagctagggaggagaggagctgtaagcagaaaagccaggcaaagaggctcttgggagactcagacagcgaggaagagcagaaagaggcagccagcagtggggatgacagtgggagagatagagaacccccagtgcagaggaagagtgaggacaggacccagcttaagggtgggaagaggttgagtggaagcagcgaggacgaggaagacagtgggaagggggaacccacagctaaaggctctagaaagatggccagactgggcagcaccagtggtgaggaaagtgacttggagagggaggtaagtgacagcgaggcagggggaggcccccagggggagaggaagaaccgctcttccaagaagagctccaggaaaggcaggacacgaagctcctcttcctcctcagatggaagtccagaggccaaaggagggaaggctggctcaggtcgccgtggagaggaccacccggctgtgatgaggctgaagcgctacattcgggcctgtggtgcccatcgaaactacaagaagctgttgggctcctgttgctcacacaaggagcgcctgagtatcctccgggcagaactggaagcgctaggcatgaagggtaccccttccctagggaagtgtcgggccctgaaggagcagagggaggaggcagctgaggtggcctccttggatgttgcgaacatcatcagtggctcgggccggccacgcagacgtacagcctggaaccctttaggagaagcagcacccccaggggagctgtaccgacggaccctggactcagatgaagagcggccccgtcccgcacccccagactggtcacatatgcgtggcatcatcagcagtgatggcgagagtaactga

SEQ ID NO: 906 - DNA, 1647 bp, Homo Sapiens
atggcaaagttcatgacacccgtgatccaggacaacccctcaggctggggtccctgtgcggttcccgagcagtttcgggatatgccctaccagccgttcagcaaaggagatcggctaggaaaggttgcagactggacaggagccacataccaagataagaggtacacaaataagtactcctctcagtttggtggtggaagtcaatatgcttatttccatgaggaggatgaaagtagcttccagctggtggatacagcgcgcacacagaagacggcctaccagcggaatcgaatgagatttgcccagaggaacctccgcagagacaaagatcgtcggaacatgttgcagttcaacctgcagatcctgcctaagagtgccaaacagaaagagagagaacgcattcgactgcagaaaaagttccagaaacaatttggggttaggcagaaatgggatcagaaatcacagaaaccccgagactcttcagttgaagttcgtagtgattgggaagtgaaagaggaaatggattttcctcagttgatgaagatgcgctacttggaagtatcagagccacaggacattgagtgttgtggggccctagaatactacgacaaagcctttgaccgcatcaccacgaggagtgagaagccactgcggagcatcaagcgcatcttccacactgtcaccaccacagacgaccctgtcatccgcaagctggcaaaaactcaggggaatgtgtttgccactgatgccatcctggccacgctgatgagctgtacccgctcagtgtattcctgggatattgtcgtccagagagttgggtccaaactcttctttgacaagagagacaactctgactttgacctcctgacagtgagtgagactgccaatgagccccctcaagatgaaggtaattccttcaattcaccccgcaacctggccatggaggcaacctacatcaaccacaatttctcccagcagtgcttgagaatggggaaggaaagatacaacttccccaacccaaacccgtttgtggaggacgacatggataagaatgaaatcgcctctgttgcgtaccgttaccgcaggtggaagcttggagatgatattgaccttattgtccgttgtgagcacgatggcgtcatgactggagccaacggggaagtgtccttcatcaacatcaagacactcaatgagtgggattccaggcactgtaatggcgttgactggcgtcagaagctggactctcagcgaggggctgtcattgccacggagctgaagaacaacagctacaagttggcccggtggacctgctgtgctttgctggctggatctgagtacctcaagcttggttatgtgtctcggtaccacgtgaaagactcctcacgccacgtcatcctaggcacccagcagttcaagcctaatgagtttgccagccagatcaacctgagcgtggagaatgcctggggcattttacgctgcgtcattgacatctgcatgaagctggaggagggcaaatacctcatcctcaaggaccccaacaagcaggtcatccgtgtctacagcctccctgatggcaccttcagctctgatgaagatgaggaggaagaggaggaggaagaagaggaagaagaagaggaagaaacttaa

SEQ ID NO: 907 - DNA, 1866 bp, Homo Sapiens
atgggcctcctgtcggacccggttcgccggcgcgcgctcgcccgcctagtgctgcgcctcaacgcgccgttgtgcgtgctgagctacgtggcgggcatcgcctggttcttggcgctggttttcccgccgctgacccagcgcacttacatgtcggagaacgccatgggctccaccatggtggaggagcagtttgcgggcggagaccgtgcccgggcttttgcccgggacttcgccgcccaccgcaagaagtcgggggctctgccagtggcctggcttgaacggacgatgcggtcagtagggctggaggtctacacgcagagtttctcccggaaactgcccttcccagatgagacccacgagcgctatatggtgtcgggcaccaacgtgtacggcatcctgcgggccccgcgtgctgccagcaccgagtcgcttgtgctcaccgtgccctgtggctctgactctaccaacagccaggctgtggggctgctgctggcactggctgcccacttccgggggcagatttattgggccaaagatatcgtcttcctggtaacagaacatgaccttctgggcactgaggcttggcttgaagcctaccacgatgtcaatgtcactggcatgcagtcgtctcccctgcagggccgagctggggccattcaggcagccgtggccctggagctgagcagtgatgtggtcaccagcctcgatgtggccgtggaggggcttaacgggcagctgcccaaccttgacctgctcaatctcttccagaccttctgccagaaagggggcctgttgtgcacgcttcagggcaagctgcagcccgaggactggacatcattggatggaccgctgcagggcctgcagacactgctgctcatggttctgcggcaggcctccggccgcccccacggctcccatggcctcttcctgcgctaccgtgtggaggccctaaccctgcgtggcatcaatagcttccgccagtacaagtatgacctggtggcagtgggcaaggctttggagggcatgttccgcaagctcaaccacctcctggagcgcctgcaccagtccttcttcctctacttgctccccggcctctcccgcttcgtctccatcggcctctacatgcccgctgtcggcttcttgctcctggtccttggtctcaaggctctggaactgtggatgcagctgcatgaggctggaatgggccttgaggagcccgggggtgcccctggccccagtgtaccccttcccccatcacagggtgtggggctggcctcgctcgtggcacctctgctgatctcacaggccatgggactggccctctatgtcctgccagtgctgggccaacacgttgccacccagcacttcccagtggcagaggctgaggctgtggtgctgacactgctggcgatttatgcagctggcctggccctgccccacaatacccaccgggtggtaagcacacaggccccagacaggggctggatggcactgaagctggtagccctgatctacctagcactgcagctgggctgcatcgccctcaccaacttctcactgggcttcctgctggccaccaccatggtgcccactgctgcgcttgccaagcctcatgggccccggaccctctatgctgccctgctggtgctgaccagcccggcagccacgctccttggcagcctgttcctgtggcgggagctgcaggaggcgccactgtcactggccgagggctggcagctcttcctggcagcgctagcccagggtgtgctggagcaccacacctacggcgccctgctcttcccactgctgtccctgggcctctacccctgctggctgcttttctggaatgtgctcttctggaagtga

SEQ ID NO: 908 - DNA, 5943 bp, Homo Sapiens
atgaacccaactaatcctttcagtgggcagcagcctagtgctttttcggcgtcttctagtaatgtaggaacacttccatctaagccgccatttcgatttggtcaaccttctctttttggacaaaacagtaccttatctgggaagagctcgggattttcacaggtatccagctttccagcgtcttctggagtaagtcattcctcttcagtgcaaacattagggttcacccaaacctcaagtgttggacccttttctggacttgagcacacttccacctttgtggctacctctgggccttcaagttcatctgtgctgggaaacacaggatttagttttaaatcacccaccagtgttggggctttcccaagcacttctgcttttggacaagaagctggagaaatagtgaactctggttttgggaaaacagaattcagctttaaacctctggaaaatgcagtgttcaaaccaatactgggggctgaatctgagccagagaaaacccagagccaaattgcttctgggttttttacattttcccacccaattagtagtgcacctggaggcctggcccctttctcttttcctcaagtaacaagtagttcagctaccacttcaaattttaccttttcaaaacctgttagtagtaataattcattatctgcctttacccctgctttgtcaaaccaaaatgtagaggaagagaagagaggacctaagtcaatatttggaagttctaataatagcttcagtagcttccctgtatcatctgcggttttgggcgaacctttccaggctagcaaagcaggtgtcaggcaggggtgtgaagaagctgtttcccaggtggaaccacttcccagcctaatgaaaggactgaaaaggaaggaggaccaggatcgctccccaaggagacatggccacgagccagcagaagattcggatcctctgtcccggggcgatcatcctccagacaaacgacctgtccgcctgaatcgaccccggggaggtactttatttggtcggacgatacaggatgttttcaaaagcaataaggaagtaggtcgtctgggcaacaaggaggccaaaaaggaaactggctttgttgagtctgcagaaagtgaccacatggctatcccaggagggaatcagtctgtcctggcaccttcccggattccaggtgtgaataaagaggaagaaactgaaagtagagagaagaaagaagattctctaagaggaactccggcgcgtcagagtaacagaagcgagagcacagacagtcttgggggcttgtctccctctgaagtcacagccatccagtgcaagaacatccctgactacctcaacgacaggaccattctggagaaccattttggcaaaattgctaaagtgcagcgcatctttaccaggcgcagcaaaaagcttgcagtggtacatttctttgatcatgcatctgcagccctggctagaaagaaggggaaaagtttgcataaagacatggctatcttttggcacaggaagaaaataagccccaataagaaacccttttccctgaaggagaagaaaccaggtgacggtgaagtcagcccgagcacagaggatgcaccctttcagcactctcctcttggcaaggccgcagggaggactggtgctagcagcctcctgaataaaagctctccagtgaagaagccaagtcttctaaaggcccaccaattcgagggagactcttttgactcagcctccgagggctccgagggcctcgggccatgtgtgctctccctcagtaccctgataggcactgtggctgagacatccaaggagaagtaccgcctgcttgaccagagagacaggatcatgcggcaagctcgggtgaagagaaccgatctggacaaagcgaggacttttgttggcacctgcctggatatgtgtcctgagaaggagaggtacatgcgggagacccgtagccagctgagcgtgttcgaagtggtcccagggactgaccaggtggaccacgcagcagctgtgaaagagtacagtcggtcctcggcggatcaggaggagcccctgccccacgagctgcggcccttgccagtgctcagcaggaccatggactacctggtgacccagatcatggaccagaaggagggcagcctgcgggattggtatgacttcgtgtggaaccgcacgcgtggcatacggaaggatatcacgcagcagcacctctgtgaccccctgacggtgtccctgattgagaagtgcacccggtttcacatccactgtgcccacttcatgtgtgaggagcccatgtcctcctttgatgccaagatcaataatgagaacatgaccaagtgcctgcagagcctgaaggagatgtaccaggacctgagaaacaagggtgtcttctgtgccagcgaagcggagttccagggctacaatgttctgctcagtctcaacaagggagacatcctaagagaagtacaacagttccatcctgctgttagaaactcatctgaggtgaaatttgctgttcaggcttttgctgcattgaacagtaataattttgtgagatttttcaaactggtccagtcagcttcttacctgaacgcttgtcttttacactgttacttcagtcagatccgcaaggatgctctccgggcgctcaactttgcgtacacggtgagcacacagcgatctaccatctttcccctggatggtgtggtgcgcatgctgctgttcagagactgtgaagaggccaccgacttcctcacctgccacggcctcaccgtttccgacggctgtgtggagctgaaccggtctgcattcctggaaccagagggattatccaagaccaggaagtcggtgtttattactaggaagctgacggtgtcagtcggggaaattgtgaacggagggccattgccccccgtccctcgtcatacccctgtgtgcagcttcaactcccagaacaagtacatcggggagagcctggccgcggagctgcccgtcagcacccagagacccggctccgacacagtgggcggagggagaggagaggagtgtggtgtagagccggatgcacccctgtccagtctcccacagtctctaccagcccctgcgccctcaccagtgcctctgcctcctgtcctggcactgaccccgtctgtggcgcccagcctcttccagctgtctgtgcagcctgaaccaccgcctccagagcccgtgcccatgtactctgacgaggacctggcgcaggtggtggacgagctcatccaggaggccctgcagagggactgtgaggaagttggctctgcgggtgctgcctacgcagctgccgccctgggtgtttctaatgctgctatggaggatttgttaacagctgcaaccacgggcattttgaggcacattgcagctgaagaagtgtctaaggaaagagagcgaagggagcaggagaggcagcgggctgaagaggaaaggttgaaacaagagagagagctggtgttaagtgagctgagccagggcctggccgtggagctgatggaacgcgtgatgatggagtttgtgagggaaacctgctcccaggagttgaagaatgcagtagagacagaccagagggtccgtgtggcccgttgctgtgaggatgtctgtgcccacttagtggacttgtttctcgtggaggaaatcttccagactgcaaaggagaccctccaggagcttcagtgcttctgcaagtatctacagcggtggagggaagctgtcacagcccgcaagaaactgaggcgccaaatgcgggctttccctgctgcgccctgctgcgtggacgtgagcgaccggctgagggcgctggcgcccagcgcagagtgccccattgctgaagagaacctggccaggggcctcctggacctgggccatgcagggagattgggcatctcctgcaccaggttaaggcggctcagaaacaagacagctcaccagatgaaggttcagcacttctaccagcagctgctgagtgatgtggcatgggcgtctctggacctgccatccctcgtggctgagcacctccctgggaggcaggagcatgtgttttggaagctggtgctggtgttgccggatgtagaggagcagtccccagagagttgtggcagaattctagcaaattggttaaaagtcaagttcatgggagatgaaggctcagtggatgacacatccagcgatgctggtgggattcagacgctttcgcttttcaactcacttagcagcaaaggggatcagatgatttctgttaacgtgtgtataaaggtggcccatggcgccctcagtgatggtgccattgatgctgtggagacacagaaggacctcctgggagccagtgggctcatgctgctgcttccccccaaaatgaagagtgaggacatggcagaggaggacgtgtactggctgtcggccttgctgcagctcaagcagctcctgcaggctaagcccttccagcctgcgcttcctctggtggttcttgtgcctagcccaggaggggacgccgttgagaaggaagtagaagatggtctgatgctacaggacttggtttcagctaagctgatttcagattacactgttaccgagatccctgataccattaatgatctacaaggttcaactaaggttttgcaagcagtgcagtggctggtttcccactgcccccattcccttgacctctgctgccagactctcattcagtacgtcgaagacgggattggccatgagtttagtggccgctttttccatgacagaagagagaggcgtctgggcggtcttgcttctcaggagcctggcgccatcattgagctgtttaacagtgtgctgcagttcctggcttctgtggtgtcctctgaacagctgtgtgacctgtcctggcctgtcactgagtttgctgaggcagggggcagccggctgcttcctcacctgcactggaatgccccagagcacctggcctggctgaagcaggctgtgctcgggttccagcttccgcagatggaccttccacccctgggggccccctggctccccgtgtgctccatggttgtccagtacgcctcccagatccccagctcacgccagacacagcctgtcctccagtcccaggtggagaacctgctccacagaacctactgtaggtggaagagcaagagtccctccccagtccatggggcaggcccctcggtcatggagatcccatgggatgatcttatcgccttgtgtatcaaccacaagctgagagactggacgcccccccggcttcctgttacatcagaggcgctgagtgaagatggtcagatatgtgtgtatttttttaaaaacgatttgaaaaaatatgatgttcctttgtcgtgggaacaagccaggttgcagacgcagaaggagctacagctgagagagggacgtttggcaataaagccttttcatccttctgcaaacaattttcccataccattgcttcacatgcaccgtaactggaagaggagcacagagtgtgctcaagaggggaggattcccagcacagaggatctgatgcgaggagcttctgctgaggagctcttggcgcagtgtttgtcgagcagtctgctgctggagaaagaagagaacaagaggtttgaagatcagcttcagcaatggttgtctgaagactcaggagcatttacggatttaacttcccttcccctctatcttcctcagactctagtgtctctttctcacactattgaacctgtgatgaaaacatctgtaactactagcccacagagtgacatgatgagggagcaactgcagctgtcagaggcgacaggaacgtgtctaggcgaacgactaaagcacctggaaaggctgatccggagttcaagggaagaggaagttgcctctgagctccatctctctgcgctgctagacatggtggacatttga

SEQ ID NO: 909 - DNA, 1062 bp, Homo Sapiens
atggcgatgacactgttggaagactggtgccgggggatggatgtgaactcccagagagctctgttagtctggggcatcccagtgaactgtgatgaggctgaaatcgaagagaccctccaggctgcgatgccccaggtctcctaccgaatgcttgggagaatgttctggagggaagaaaatgcgaaagcagccttattagagctcactggcgctgtagattacgccgcgatccccagggagatgccgggcaaaggaggggtctggaaagtgttatttaagcccccaacttctgatgctgaatttttagaaagattgcacctcttcctagctagagaggggtggaccgtgcaagatgttgcccgtgtccttgggtttcagaaccctactccgaccccgggcccagagatgccagcagagatgctaaactatattttggataatgttattcagcctcttgttgagtccatatggtacaagaggctgacacttttctcggggagggacatcccagggcctggagaggaaacctttgatccctggctggagcacactaatgaggtcctagaggagtggcaggtgtccgatgtagaaaagaggcggcggttgatggagagtcttagaggccccgccgctgatgttattcgcatccttaagtccaacaaccccgcgataaccactgccgaatgcctgaaggcgcttgagcaggtgtttgggagcgttgagagctctagggatgcccagatcaaatttctgaacacttatcagaacccgggagaaaaattgtctgcttatgtcattcgtctggagcctctgctacagaaggtggtagagaagggggccattgataaagataatgtgaaccaggcccgcctagagcaggtcattgccggggccaaccacagcggggccatccgaaggcagctgtggcttaccggggctggggaagggccagccccaaacctctttcagttgctggtgcagatccgtgaggaggaagccaaggaggaggaggaggaggctgaggccacccttctgcagttaggcctggaagggcacttctga

SEQ ID NO: 910 - DNA, 999 bp, Homo Sapiens
gttccactggctgctttgggggctcctactcttgatcctgcccttgctgcacttgggctacctggagcaaacttgaactctcagtctcttgctgcagatcagttgctgaagcttatgagtactgttgatcccaagttgaatcatgtagctgctggtctcgtttcaccaagtctgaaatcggatacctctagtaaagaaatagaggaagctatgaaaagagtacgagaagcacagtccctaatttctgctgctatagaaccagataagaaagaagaaaaaagaaggcattcaagatcaagatcacgttctaggaggaggaggactccctcatcttctagacacaggcggtcaagaagcagatcgagacggcggtcacattctaagtctaggagtcggcgacgatccaaaagcccaaggcggagaagatctcattccagagaaagaggtagaaggtcaaggagcacatcaaaaacaagagacaaaaagaaagaagacaaagaaaagaaacgttctaaaacaccaccaaaaagttacagcacagccagacgttctagaagtgcaagcagagagagacgacgacgaagaagcaggagtggcacaagatctcctaaaaagcctcggtctcctaaaagaaaattgtcccgctcaccatcccctaggagacataaaaaggagaagaagaaagataaagacaaagaaagaagtagggatgaaagagaacgatcaacaagcaagaagaagaagagtaaagataaggaaaaggaccgggaaagaaaatcagagagtgataaagatgtaaaacaggttacacgggattatgatgaagaggaacaggggtatgacagtgagaaagagaaaaaagaagagaagaaaccaatagaaacaggttcccctaaaacaaaggaacgttctgtggaaaagggaactggtgattcactaagagaatccaaagtgaatggggatgatcatcatgaagaagacatggatatgagtgactga

SEQ ID NO: 911 - DNA, 867 bp, Homo Sapiens
atgagttccagaaagcagggttctcaacctcgtggacagcaatctgcagaagaagagaacttcaaaaaaccaactagaagcaacatgcagagaagtaaaatgagaggggcctcctcaggaaagaagacagctggtccacagcagaaaaatcttgaaccagctctcccaggaagatggggtggtcgctctgcagagaaccccccttcaggatccgtgaggaagaccagaaagaacaagcagaagactcctggaaacggagatggtggcagtaccagcgaagcacctcagccccctcggaagaaaagggcccgggcagaccccactgttgaaagtgaggaggcgtttaagaatagaatggaggttaaagtgaagattcctgaagaattaaaaccatggcttgttgaggactgggacttagttaccaggcagaagcagctgtttcaactccctgccaagaaaaatgtagatgcaattctggaggagtatgcaaattgcaagaaatcgcagggaaatgttgataataaggaatatgcggttaatgaagttgtggcaggaataaaagaatatttcaatgtgatgttgggcactcagctgctctacaaatttgagaggccccagtatgctgaaatcctcttggctcaccctgatgctccaatgtcccaggtttatggagcaccacacctactgagattatttgtaagaattggagcaatgttggcctatacgccccttgatgagaaaagccttgcattattgttgggctatttgcatgatttcctaaaatatctggcaaagaattctgcatctctctttactgccagtgattacaaagtggcttctgctgagtaccaccgcaaagccctgtga

SEQ ID NO: 912 - DNA, 3618 bp, Homo Sapiens
atgaggaagcctcgtcggaagtcccggcagaatgccgagggccggcgttccccgtccccctacagtctcaagtgctcacccacccgggagaccctgacatatgcccaggcccagcggattgtcgaggtagacattgatggacgcctgcatcgtatcagcatctatgacccactcaaaatcattactgaagatgagctaactgcccaggatatcaccgaatgcaatagtaacaaggaaaacagtgaacagcctcagttccctggcaagtccaagaaaccctcatccaagggcaaaaagaaggaatcctgctccaagcatgcatctggtacttccttccacctcccacagcccagcttccgtatggtggactcaggcatccagccagaagcacccccgctgcctgctgcctactaccgctacattgagaagccacctgaagacctggatgcagaggtagagtatgacatggatgaggaggaccttgcctggctggacatggtgaatgaaaaacggcgagtagatgggcacagtttggtgtctgcagatacctttgagctgctggtagaccggcttgagaaagagtcatacttggagagtcgcagcagtggggcccaacagtcactcatcgatgaagacgctttctgctgtgtgtgcctggatgatgaatgtcacaatagcaatgttattctcttctgtgacatctgcaacctggctgtacaccaggagtgctatggcgtcccatacatccctgagggccagtggctatgccgctgctgcctgcagtctccctcccggcctgtggattgcatcctttgccccaataagggtggcgccttcaaacagaccagtgatgggcactgggcccatgtggtgtgtgccatctggatccctgaagtctgctttgctaacaccgtgttcttggaacctattgagggcattgacaatatcccgcctgcccgctggaaactaacctgctatatctgcaagcagaaagggctaggtgcagccatccagtgccataaggtgaactgctacacagcattccatgtgacatgtgcacagcgggctgggctcttcatgaagattgagcccatgcgcgaaaccagcctcaatggcaccatctttacagtgcgcaagactgcctactgtgaggcccactcgccaccaggtgcggccactgctaggaggaagggcgactcccctagaagcatcagtgagactggcgatgaggaagggctgaaggagggtgatggagaggaggaagaagaggaagaggtggaggaagaagagcaggaagctcaaggcggggtgagtggctccctcaagggagtgcccaagaaaagcaagatgagtttgaagcagaagatcaagaaggagccagaggaagcaggccaagacacaccctccactctccccatgcttgctgtcccacagataccctcttacaggttgaacaagatctgtagtggtctctcctttcagaggaaaaaccagtttatgcagcggcttcacaattattggctgttgaagcggcaggcacggaatggtgtccctcttatccggcgcttgcactcccatctgcagtcccaaagaaacgctgagcagcgagagcaggatgagaagacaagtgcagtgaaggaggagctgaagtattggcagaagctccggcatgacttggagcgggcgcggctgctgattgagctgattcggaagagagagaagctcaaacgagagcaggtcaaagtccagcaggctgccatggagctggagctgatgccattcaatgttctgttgaggacaacactggacctgctgcaggagaaggatcctgcacacatcttcgcagaaccagtcaacttgagtgaggttccagattacctggaattcatatccaagccaatggatttttctactatgaggcggaagctggagtcccacctgtaccgcaccttggaggagtttgaggaggactttaaccttatagttaccaactgcatgaagtataatgctaaagacacaattttccaccgagcagctgtccgcctgcgggacctgggaggggccatcctacggcacgcccggcggcaggcagagaacatcggctatgaccccgagaggggcactcacctgcccgagtcacccaaattggaagacttttaccgcttctcctgggaagacgtggacaacatcctcatcccagagaaccgggcccatttgtccccagaggtgcagctgaaggagctgctggagaaactggacctggtgagcgccatgcggtccagtggggcccgcacccgtcgtgtccgcctgctacgccgggagatcaatgcccttcggcagaagctggcacagccaccaccaccacagccaccatcactcaacaagacagtatccaatggggagctgccagcagggccccagggggatgcagctgtgctggagcaggccttgcaggaggagccagaagacgatggggacagagatgactccaaactgcctcctccgccaaccctggagcccactgggcctgcaccttccttgtctgagcaagaatcccccccggagccccctactctgaaacccattaatgatagcaaacctccaagcaggttcctaaagcccagaaaggtggaagaagatgagctcttggaaaaatcaccactgcagctagggaatgagcctttgcaacgcttgctcagtgacaatggcatcaacagactatccctcatggcccctgacaccccggccggtaccccacttagtggtgtgggtcgccgcacatcagtcctcttcaagaaggccaagaatggggttaagctacagagaagcccagacagggtcctggagaatggcgaggaccatggtgtggcaggctctcctgcctctccagccagcatcgaggaagagcgccactcccggaagcggccaaggagcaggagctgtagtgagagcgaaggggagaggtccccccagcaggaggaagagacaggcatgaccaacggctttggaaaacacaccgaaagcgggtctgactctgaatgtagtttgggtctcagtggtggactggcatttgaagcttgcagtggtctgacgccccccaaacgcagccgtgggaagccagccctgtctcgagtgcccttcctggaaggtgtgaacggagactctgactacaatggctcaggcagaagcctcctgctgccctttgaagaccgcggagacctggagcccttggagctggtgtgggccaagtgccgaggctacccctcctaccctgccttgatcatcgatcccaagatgccccgggagggcctcctgcacaatggcgttcccatccctgtccccccgctggacgtgctgaagctgggagagcagaaacaggcagaggctggagagaagctcttccttgtcctcttctttgacaacaagcgcacctggcagtggcttccaagggacaaagtcctgcccttgggtgtggaagacaccgtggacaagctcaagatgctggaaggccgcaagaccagcatccgcaagtcagtgcaggtggcctatgaccgtgcgatgatccacctgagcagagtccgggggccccactccttcgtcacttccagctacctgtaa

SEQ ID NO: 913 - DNA, 579 bp, Homo Sapiens
atggcccccaagccgggggccgagtggagcacagccctgtcccatctggtgctgggagtggtgtctctgcacgcagccgtgagcacagccgaggcaagtcgaggggctgctgctggcttcctgctccaggtcttggctgccaccaccacgctggccccagggctgagcacacacgaagactgccttgctggagcctgggtggccaccgtcatcggccttccccttctggccttcgatttccactgggtgaatggggaccgctcctctgccaacctgctcctgggaggaggcatggtgctggcagtggctggcggccacctcggccctgagggccgctctgtggctggtcaggcaatgctgttggtggtcgcagtgaccatcctcattgtagctgtcttcacggccaacacttatgggatgtgggggggggcgatgctgggtgtggcaggcctcctgagccggctggaggaggacaggctgctgctgctaccgaaggaggatgtctgtcgctgggccttggctgtaggcagctgggcttactgccgggccctgcatacacagcgcctccagtgggagtga

SEQ ID NO: 914 - DNA, 465 bp, Homo Sapiens
atgaccacaaccaccaccttcaagggagtcgaccccaacagcaggaatagctcccgagttttgcggcctccaggtggtggatccaatttttcattaggttttgatgaaccaacagaacaacctgtgaggaagaacaaaatggcctctaatatctttgggacacctgaagaaaatcaagcttcttgggccaagtcagcaggtgccaagtctagtggtggcagggaagacttggagtcatctggactgcagagaaggaactcctctgaagcaagctccggagacttcttagatctgaagggagaaggtgatattcatgaaaatgtggacacagacttgccaggcagcctggggcagagtgaagagaagcccgtgcctgctgcgcctgtgcccagcccggtggccccggccccagtgccatccagaagaaatccccctggcggcaagtccagcctcgtcttgggttag

SEQ ID NO: 915 - DNA, 429 bp, Homo Sapiens
atggctgccgccgtcgctgctgccggtgcaggggaaccccagtccccggacgaattgctcccgaaaggcgacgcggagaagcctgaggaggagctggaggaggacgacgatgaggagctagatgagaccctgtcggagagactatggggcctgacggagatgtttccggagagggtccggtccgcggccggagccacttttgatctttccctctttgtggctcagaaaatgtacaggttttccagggcagccttgtggattgggaccacttcctttatgatcctggttcttcccgttgtctttgagacggagaagttgcaaatggagcaacagcagcaactgcagcagcggcagatacttctaggacctaacacagggctctcaggaggaatgccaggggctctaccctcacttcctggaaagatctag

SEQ ID NO: 916 - DNA, 6654 bp, Homo Sapiens
atggacggcgatggcggccgccgagacgtccccggcacgctgatggagcccgggcgcggcgcggggcccgcgggcatggcggagcctcgggcgaaggcggcgcggccggggccccagcgctttctgcggcgcagcgtggtagagtcggaccaggaggagccgccgggcttggaggcagccgaggcgccgggcccgcagcccccgcagcccctgcagcgccgggtgcttctgctctgcaagacgcgccgcctcatcgcggagcgcgcccgcggacgccccgccgcccccgcgcccgcagcgctggtagcgcagccgggagcccccggagcccccgcggacgccggccccgagcccgtgggcacgcaggagcccggcccggaccccatcgcagccgctgtcgaaaccgcgcctgcccccgacggcggccccagggaggaggcggcggcgaccgtgaggaaggaggatgagggggcggccgaggcgaagcctgagcccgggcgcactcgccgggacgagcccgaagaggaggaggacgacgaggacgacctcaaggccgtggccacctctctggacggccgcttcctcaagttcgacatcgagctgggccgcggttccttcaagacggtctacaaggggctggacacggagacctgggtggaggtggcctggtgtgagctgcaggaccggaagctcaccaagctggagcggcagcggttcaaggaagaggctgagatgctgaaaggcctgcagcaccccaacatcgtgcgcttctacgacttctgggagtccagcgccaagggcaagcggtgcattgtgctggtgacggagctgatgacctcagggacgctgaagacatacctgaagcggttcaaggtgatgaagcccaaggttctccgcagctggtgccggcagatcctgaagggcctgctgttcctgcacacaaggacgccacccatcatccaccgagacctgaaatgtgacaatattttcatcaccggaccaactgggtctgtgaagattggcgacttgggcctggccactctgaaaagagcgtcatttgccaaaagtgtgataggtactcccgagttcatggcgcccgagatgtacgaggagcactacgatgagtccgtggacgtctatgcctttgggatgtgcatgctggagatggccacctcggagtacccctactcggagtgccagaatgcggcccagatctaccgcaaggtcacctgtggtatcaagccggccagctttgagaaagtgcacgatcctgaaatcaaggagattattggggagtgtatctgcaaaaacaaggaggaaaggtacgagatcaaagacctgctgagccacgccttcttcgcagaggacacaggcgtgagggtggagctcgcggaggaggaccacggcaggaagtccaccatcgccctgaggctctgggtggaagaccccaagaaactgaagggaaagcccaaggacaatggagccatagagttcaccttcgacctggagaaggagacgccggatgaggtggcccaagagatgattgagtctggattcttccacgagagtgacgtcaagatcgtggccaagtccatccgtgaccgcgtggccttgatccagtggcggcgggagaggatctggcccgcgctgcagcccaaggagcagcaggatgtgggcagcccggacaaggccaggggtccgccggtgcccctgcaggtccaggtgacctaccatgcacaggctgggcagcccgggccaccagagcccgaggagccggaggccgaccagcacctcctgccacctacgttgccgaccagcgccacctccctggcctcggacagcaccttcgacagcggccagggctctaccgtgtactcagactcgcagagcagccagcagagcgtgatgcttggctcccttgccgacgcagcgccgtccccggcccagtgtgtgtgcagcccccctgtgagcgaggggcccgtcctgccgcagagcctgccctcgctgggggcctaccagcagcccacggctgcacctggcttgccggtgggctctgtcccggcccccgcctgccctccgtccctccagcagcacttcccggatccggccatgagcttcgcccccgtgctgccgccgcccagcacccccatgcccacgggcccaggccagccagcaccccccggccagcagcctcctccgctggcccagccgacacccctgccgcaggtcctggccccacagcccgtggtccccctccagccggttcccccccacctgccaccgtacctggctccagcctcccaggtgggggcccccgctcagctgaagcccctccagatgccacaggcgcccctgcagccgcttgctcaagtccctccgcagatgcccccgattcctgttgtgccccccatcacgcccctggcgggaatcgacggcctccctccggccctcccagacctgccgaccgcgactgtgcctcccgtgccaccacctcagtatttctctccagccgtgatcttgccgagcctcgctgccccactcccccctgcgtccccagccttgcctctgcaggctgtgaagctgccccacccccctggggcgcccctggccatgccctgccggaccattgtgccaaatgcaccggccactatccccctgctggccgtagccccaccgggcgtggctgccctgtccattcattctgccgtggcccagctcccaggccaacctgtgtacccagcggccttcccacagatggcgcctactgacgtccctccttccccccatcacacggtgcagaatatgagggccacccctccacagccggcactgcctccacaacccacactgcccccacaacccgtgctgcccccgcaacccacgctgccccctcaacctgtgttgcccccgcaacccacacggccccctcaacctgtgctgcccccgcaacccatgctgcccccacaacctgtgctgcccccgcagccggcactgcctgtgcgccctgagcccctccagccccaccttcctgaacaagctgctccagctgctacaccagggagccagattctgcttggccacccagctccctatgctgtggacgtcgccgctcaggtccccaccgtgcctgtgccaccggctgcggtcctctcgccgcctctgccggaagtgctgctgcctgccgcccctgagctcctgcctcagttccccagctccctggccacggtgtctgcctctgtgcagagtgtgcccacccagactgccacacttctgccaccagcaaacccaccgctgcctggcgggcccgggatcgccagcccttgcccaactgtccagctgacggtggaaccagtccaagaggagcaggcctcacaggacaagccgcccggcctcccgcagagctgtgagagctatggaggttctgatgtcacttctggaaaagagctgagtgacagctgtgaaggcgcctttggagggggcaggctggagggcagggcagcccgaaaacaccaccgcaggtccacgcgtgcgcgctcccggcaggagagggccagccggccccggcttaccatcttgaacgtgtgcaacactggggacaagatggtggagtgccagctggagacgcacaaccacaagatggtgaccttcaagttcgacttggacggggacgcacccgatgaaattgccacgtatatggtggagcatgactttatcctgcaggccgagcgggaaacgttcatcgagcagatgaaggatgtcatggacaaggcagaggacatgctcagcgaggacacagacgccgaccgtggctccgacccagggaccagcccgccacacctcagcacctgcggcctgggcaccggggaggagagccgacaatcccaagccaacgcccccgtgtatcagcagaacgtcctgcacaccgggaagaggtggttcatcatctgtccggtggctgagcaccccgcccccgaggcccctgaatcttcgcccccacttcctctaagctccctgccgccagaagccagccaagattcagcgccctataaagaccagctgtcctcgaaggaacaacccagctttctagccagtcagcagctcctgagccaggcgggccccagcaaccctcctggggcacccccagcccctttggccccctcctcccctcctgtgactgctctgccccaagatggagcagctccagccaccagcaccatgccagagccagcgtcaggaactgccagccaggcagggggtccagggacacctcaggggctgaccagtgagctcgagacgtctcagccactagcggagactcacgaggccccgcttgctgtgcagcccctcgtggtgggcctagcaccttgcactccagctccagaggctgcctcaaccagggacgccagtgccccaagggagcccctgccacctcctgcacctgagcccagcccccacagcgggaccccacagcccgccttgggtcaacctgctcccctgcttcctgccgcagtgggggccgtcagcctggccacctcccagctcccaagcccacccctggggcccaccgtccccccacagccaccctcggccctggagtcggatggggaagggccgccccccagggtgggctttgtggacagcaccatcaagagcctggacgagaagctgcggactctgctctaccaggagcacgtgcccacctcctcagcctcagctgggacccctgtggaggtgggcgacagagacttcaccctggagcccctgagaggggaccagccccgctcagaggtctgcgggggggacctggccctgcccccagtgcctaaggaggcggtctcagggcgtgtccagctgccccagcccttggtggagaagtcagaactggcccccactcgaggggccgtgatggagcagggcacgtcctcgtcaatgacagcagagtcgtctcccaggagtatgctaggctatgacagagatggaaggcaggtggcctcagactcccatgtggtccccagcgtcccccaggatgtacctgcttttgtgagacctgcacgtgtggagcccacagacagggatggtggagaagctggagaaagctcggcagagcccccgccgagtgacatgggcacagtggggggccaggctagccacccccagacactcggcgctcgagctttggggtcccctcggaaacgtccagagcagcaggatgtcagctcaccagccaagactgtgggccgtttctcggtggtcagcactcaggacgagtggaccctggcctccccccacagcctgagatactctgccccacccgacgtctacctggacgaggccccctccagccccgacgtgaagctggcagtgcggcgggcgcagacggcctcctccatcgaggtcggcgtgggcgagcccgtgtccagcgactctggggacgagggccctcgggcgagacccccggtgcagaagcaggcgtccctgcccgtgagtggcagcgtggctggcgacttcgtgaagaaggccaccgccttcctgcagaggccttctcgggccggctcgctgggccccgagacacccagcagggtgggcatgaaggtccccacgatcagcgtgacctccttccattcccagtcgtcctacatcagcagcgacaatgattcggagctcgaggatgctgacataaagaaggagctgcagagtctgcgggagaagcacctgaaggagatctcggagctgcagagccagcagaagcaggagatcgaagctctgtaccgccgcctgggcaagccactgccccccaacgtgggcttcttccacacggcaccccccactggccgccggagaaaaaccagcaagagcaagctgaaggcaggcaagctgctaaatcccctggtgcggcagctcaaggtcgtggcctccagcacaggtcacttggctgactccagcagaggccctcccgctaaggaccctgcccaagccagtgtggggctcactgcagacagcacgggcctgagcgggaaggcagtgcagacccagcagccctgctccgtccgggcctccctgtcttcggacatctgctccggcttagccagtgatggaggcggagcgcgtggccaaggctggacggtttaccacccaacgtctgagagagtgacctataagtctagtagcaaacctcgtgctcgattcctcagtggacccgtatctgtgtccatctggtctgccctgaagcgtctctgcctaggcaaagaacacagcagtaggtcctccaccagcagcctggccccaggccctgagccaggcccccagcccgccctgcacgtccaggcgcaggtgaacaacagcaacaacaagaagggtaccttcacggacgacctgcacaagctggtggacgagtggacgagcaagacggtgggggccgcgcagctgaagcccacgctcaaccagctgaagcagacccagaagctgcaagacatggaggcccaggcaggctgggctgcccctggcgaggcgcgggctatgaccgcacctcgagcaggagtggggatgccacgtctgcccccagcgcccggccctctgtccaccacggtcattcccggagccgccccgaccctgtccgtgcccacaccagatcctgagagtgagaagcctgactga

SEQ ID NO: 917 - DNA, 1566 bp, Homo Sapiens
atgctgccccgtcggcctctggcgtggcccgcgtggctgttgcggggtgctccgggagccgcgggttcttggggtcggccggttggccccctggcccgcagaggctgctgctccgccccggggacccccgaggtgccgctgacccgggagcgctaccccgtgcggcgcttgccgttctccacggtgtctaagcaggacctggccgcctttgagcgcatcgtgcccggcggggtcgtcacggacccggaagcgctgcaggctcccaacgtggactggttgcggacgctgcgaggctgtagcaaggtgctgctgaggccacggacgtcggaggaggtgtcccacatcctcaggcactgccacgagaggaacctggccgtgaacccacaggggggcaacacaggcatggtgggtggcagcgtccccgtctttgacgagatcatcctctccactgcccgcatgaaccgggtcctcagcttccacagcgtgtctggaattctggtttgccaggcgggctgcgtcctggaggagctgagccggtatgtggaggaacgggacttcatcatgccgctggacttaggagccaagggcagctgccacatcgggggaaacgtggcaaccaacgctggaggcctgcggtttcttcgatatggctcactgcatgggactgtcctgggcctggaagtggtgctggccgacggcactgtcctggactgcctgacctccctgaggaaggacaacacgggctatgacctgaagcagctgttcatcgggtcggagggcactttggggatcatcaccacggtgtccatcttgtgtccacccaagcccagggctgtgaacgtggctttcctcggctgcccaggctttgctgaggttctgcagaccttcagcacctgcaaggggatgctgggtgagatcctgtctgcattcgagttcatggatgctgtgtgcatgcagctggtcgggcgccatctccacctggccagcccggtgcaagagagtccgttttacgtcctcatcgagacttcaggctccaacgcaggccatgacgctgagaagctgggccacttcctggagcacgcgctgggctccggcctggtgaccgatgggaccatggccaccgaccagaggaaagtcaagatgctgtgggccctgagggaaaggatcacagaggcgctgagccgggatggctacgtgtacaagtacgacctctccctccctgtggagcggctctacgacatcgtgactgacctgcgcgcccgcctcggcccgcacgccaagcacgtggtgggctatggccaccttggagatggtaacctgcacctcaatgtgacggcggaggccttcagcccctcgctcctggctgccctggagccccacgtgtacgagtggacggccgggcagcagggcagcgtcagcgcggagcacggagtgggcttcaggaagagggacgtcctgggctacagcaagccaccgggggccctgcagctcatgcagcagctcaaggccctgctggaccccaagggcatcctcaacccctacaagacgctgcccagccaggcctga

SEQ ID NO: 918 - DNA, 2631 bp, Homo Sapiens
atgggaccagaggccctgtcatctttactgctgctgctcttggtggcaagtggagatgctgacatgaagggacattttgatcctgccaagtgccgctatgccctgggcatgcaggaccggaccatcccagacagtgacatctctgcttccagctcctggtcagattccactgccgcccgccacagcaggttggagagcagtgacggggatggggcctggtgccccgcagggtcggtgtttcccaaggaggaggagtacttgcaggtggatctacaacgactgcacctggtggctctggtgggcacccagggacggcatgccgggggcctgggcaaggagttctcccggagctaccggctgcgttactcccgggatggtcgccgctggatgggctggaaggaccgctggggtcaggaggtgatctcaggcaatgaggaccctgagggagtggtgctgaaggaccttgggccccccatggttgcccgactggttcgcttctacccccgggctgaccgggtcatgagcgtctgtctgcgggtagagctctatggctgcctctggagggatggactcctgtcttacaccgcccctgtggggcagacaatgtatttatctgaggccgtgtacctcaacgactccacctatgacggacataccgtgggcggactgcagtatgggggtctgggccagctggcagatggtgtggtggggctggatgactttaggaagagtcaggagctgcgggtctggccaggctatgactatgtgggatggagcaaccacagcttctccagtggctatgtggagatggagtttgagtttgaccggctgagggccttccaggctatgcaggtccactgtaacaacatgcacacgctgggagcccgtctgcctggcggggtggaatgtcgcttccggcgtggccctgccatggcctgggagggggagcccatgcgccacaacctagggggcaacctgggggaccccagagcccgggctgtctcagtgccccttggcggccgtgtggctcgctttctgcagtgccgcttcctctttgcggggccctggttactcttcagcgaaatctccttcatctctgatgtggtgaacaattcctctccggcactgggaggcaccttcccgccagccccctggtggccgcctggcccacctcccaccaacttcagcagcttggagctggagcccagaggccagcagcccgtggccaaggccgaggggagcccgaccgccatcctcatcggctgcctggtggccatcatcctgctcctgctgctcatcattgccctcatgctctggcggctgcactggcgcaggctcctcagcaaggctgaacggagggtgttggaagaggagctgacggttcacctctctgtccctggggacactatcctcatcaacaaccgcccaggtcctagagagccacccccgtaccaggagccccggcctcgtgggaatccgccccactccgctccctgtgtccccaatggctctgcctacagtggggactatatggagcctgagaagccaggcgccccgcttctgcccccacctccccagaacagcgtcccccattatgccgaggctgacattgttaccctgcagggcgtcaccgggggcaacacctatgctgtgcctgcactgcccccaggggcagtcggggatgggccccccagagtggatttccctcgatctcgactccgcttcaaggagaagcttggcgagggccagtttggggaggtgcacctgtgtgaggtcgacagccctcaagatctggttagtcttgatttcccccttaatgtgcgtaagggacaccctttgctggtagctgtcaagatcttacggccagatgccaccaagaatgccaggaatgatttcctgaaagaggtgaagatcatgtcgaggctcaaggacccaaacatcattcggctgctgggcgtgtgtgtgcaggacgaccccctctgcatgattactgactacatggagaacggcgacctcaaccagttcctcagtgcccaccagctggaggacaaggcagccgagggggcccctggggacgggcaggctgcgcaggggcccaccatcagctacccaatgctgctgcatgtggcagcccagatcgcctccggcatgcgctatctggccacactcaactttgtacatcgggacctggccacgcggaactgcctagttggggaaaatttcaccatcaaaatcgcagactttggcatgagccggaacctctatgctggggactattaccgtgtgcagggccgggcagtgctgcccatccgctggatggcctgggagtgcatcctcatggggaagttcacgactgcgagtgacgtgtgggcctttggtgtgaccctgtgggaggtgctgatgctctgtagggcccagccctttgggcagctcaccgacgagcaggtcatcgagaacgcgggggagttcttccgggaccagggccggcaggtgtacctgtcccggccgcctgcctgcccgcagggcctatatgagctgatgcttcggtgctggagccgggagtctgagcagcgaccacccttttcccagctgcatcggttcctggcagaggatgcactcaacacggtgtga

SEQ ID NO: 919 - DNA, 945 bp, Homo Sapiens
atgagccgggtaccagcgttcctgagcgcggccgaggtggaggaacacctccgcagctccagcctcctcatcccgcctctagagacggccctggccaacttctccagcggtcccgaaggaggggtcatgcagcccgtgcgcaccgtggtgccggtgaccaagcacaggggctacctgggggtcatgcccgcctacagtgctgcagaggatgcactgaccaccaagttggtcaccttctacgaggaccgcggcatcacctcggtcgtcccttcccaccaggctactgtgctactctttgagcccagcaatggcaccctgctggcggtcatggatggaaatgtcataactgcaaagagaacagctgcagtttctgccattgccaccaagtttctgaaacctcccagcagtgaagtgctgtgcatccttggggctggggtccaggcctacagccattatgagatcttcacagagcagttctcctttaaggaggtgaggatatggaaccgcaccaaagaaaatgcagagaagtttgcagacacagtgcaaggagaggtacgggtctgttcttcggtccaggaggctgtggcaggtgcagatgtgatcatcacagtcaccctggcaacagagcccattttgtttggtgaatgggtgaagccaggggctcacatcaatgctgttggagccagcagacctgactggagagaactggatgatgagctcatgaaagaagctgtgctgtacgtggattcccaggaggctgccctgaaggagtctggagatgtcctgctgtcaggggccgagatctttgctgagctgggagaagtgattaagggagtgaaaccagcccactgtgagaagaccaccgtgttcaagtctttgggaatggcagtggaagacacagttgcagccaaactcatctatgattcctggtcatctggtaaataa

SEQ ID NO: 920 - DNA, 327 bp, Homo Sapiens
atgggagtgcaggtggaaaccatctccccaggagacgggcgcaccttccccaagcgcggccagacctgcgtggtgcactacaccgggatgcttgaagatggaaagaaatttgattcctcccgggacagaaacaagccctttaagtttatgctaggcaagcaggaggtgatccgaggctgggaagaaggggttgcccagatgagtgtgggtcagagagccaaactgactatatctccagattatgcctatggtgccactgggcacccaggcatcatcccaccacatgccactctcgtcttcgatgtggagcttctaaaactggaatga

SEQ ID NO: 921 - DNA, 1386 bp, Homo Sapiens
atgaacaactttggtaatgaagagtttgactgccacttcctcgatgaaggttttactgccaaggacattctggaccagaaaattaatgaagtttcttcttctgatgataaggatgccttctatgtggcagacctgggagacattctaaagaaacatctgaggtggttaaaagctctccctcgtgtcacccccttttatgcagtcaaatgtaatgatagcaaagccatcgtgaagacccttgctgctaccgggacaggatttgactgtgctagcaagactgaaatacagttggtgcagagtctgggggtgcctccagagaggattatctatgcaaatccttgtaaacaagtatctcaaattaagtatgctgctaataatggagtccagatgatgacttttgatagtgaagttgagttgatgaaagttgccagagcacatcccaaagcaaagttggttttgcggattgccactgatgattccaaagcagtctgtcgtctcagtgtgaaattcggtgccacgctcagaaccagcaggctccttttggaacgggcgaaagagctaaatatcgatgttgttggtgtcagcttccatgtaggaagcggctgtaccgatcctgagaccttcgtgcaggcaatctctgatgcccgctgtgtttttgacatgggggctgaggttggtttcagcatgtatctgcttgatattggcggtggctttcctggatctgaggatgtgaaacttaaatttgaagagatcaccggcgtaatcaacccagcgttggacaaatactttccgtcagactctggagtgagaatcatagctgagcccggcagatactatgttgcatcagctttcacgcttgcagttaatatcattgccaagaaaattgtattaaaggaacagacgggctctgatgacgaagatgagtcgagtgagcagacctttatgtattatgtgaatgatggcgtctatggatcatttaattgcatactctatgaccacgcacatgtaaagccccttctgcaaaagagacctaaaccagatgagaagtattattcatccagcatatggggaccaacatgtgatggcctcgatcggattgttgagcgctgtgacctgcctgaaatgcatgtgggtgattggatgctctttgaaaacatgggcgcttacactgttgctgctgcctctacgttcaatggcttccagaggccgacgatctactatgtgatgtcagggcctgcgtggcaactcatgcagcaattccagaaccccgacttcccacccgaagtagaggaacaggatgccagcaccctgcctgtgtcttgtgcctgggagagtgggatgaaacgccacagagcagcctgtgcttcggctagtattaatgtgtag

SEQ ID NO: 922 - DNA, 471 bp, Homo Sapiens
atgcccatggcggggcttctaaaggggcttgtacggcaactggagcggttcagcgttcaacaacaagcttccaagatgccgcccaaaggaaaaagtggttctggaaaagcggggaaagggggagcagcctctgggagtgacagtgctgacaagaaggctcaaggtcccaaaggtggtggcaatgcagtaaaggtcagacacattctatgtgaaaaacatggcaaaatcatggaagccatggaaaagttaaagtctgggatgagattcaatgaagtggccgcacagtatagtgaagataaagccaggcaagggggtgacttgggttggatgaccagagggtccatggtgggaccatttcaagaagcagcatttgccttgcctgtaagtgggatggataagcctgtgtttacagacccaccggttaagacaaaatttggatatcatattattatggtcgaaggaagaaaataa

SEQ ID NO: 923 - DNA, 1158 bp, Homo Sapiens
atgcccaagaagctgctgctgttgcccccgccctccgcgtcctcggctttccgcgtcccgcgcgcccgccccgttcccccgccggccatgaacgccgctcgcaccggctaccgagtcttctcggccaactccacggccgcctgcacggagctggccaagcgcatcacagagcgccttggtgctgaattggggaagtctgttgtatatcaagagaccaatggagaaacaagagttgaaataaaagaatctgttcgtggccaagatattttcattatacagacaatacccagagatgtgaatacagctgtgatggagttgctcatcatggcttacgcactgaagactgcctgtgccaggaacattattggggtcatcccctacttcccctacagcaagcagagcaagatgaggaagaggggttccattgtgtgcaagctgctagcatccatgctggcgaaagcaggtttaactcacattatcactatggatcttcatcaaaaggaaatacaaggctttttcagctttcctgtggacaaccttagagcctcacctttcctgcttcagtatatccaggaagaaattccaaattacagaaatgcagtcattgtagctaagtctcctgatgctgcaaagagggcccagtcctatgcggagagactgcgtctgggtttggccgtcattcacggggaagctcagtgcacggaactggacatggacgatggtcgtcactccccgcctatggtcaaaaatgctactgtgcacccaggcctggagttgccattgatgatggccaaagagaagccaccgataactgtagttggagatgttggaggccgcatcgcaatcatcgtggatgacattattgacgatgtggagagttttgttgctgccgcggagatcctgaaagagagaggcgcctataagatctatgttatggccacccacggcatcctgtctgcagaggcccctcgcctgattgaggagtcctccgtagacgaggtggtggtgacgaatactgtccctcatgaggttcagaagctgcaatgtcccaagataaagactgtggatatcagtttgattctttctgaagccattcggagaatccacaatggagagtccatggcctaccttttccgaaacatcactgtggatgactag

SEQ ID NO: 924 - DNA, 348 bp, Homo Sapiens
atgcgctacgtcgcctcctacctgctggctgccctagggggcaactcctcccccagcgccaaggacatcaagaagatcttggacagcgtgggtatcgaggcggacgacgaccggctcaacaaggttatcagtgagctgaatggaaaaaacattgaagacgtcattgcccagggtattggcaagcttgccagtgtacctgctggtggggctgtagccgtctctgctgccccaggctctgcagcccctgctgctggttctgcccctgctgcagcagaggagaagaaagatgagaagaaggaggagtctgaagagtcagatgatgacatgggatttggcctttttgattaa

SEQ ID NO: 925 - DNA, 255 bp, Homo Sapiens
atgcctctcgcaaaggatctccttcatccctctccagaagaggagaagaggaaacacaagaagaaacgcctggtgcagagccccaattcctacttcatggatgtgaaatgcccaggatgctataaaatcaccacggtctttagccatgcacaaacggtagttttgtgtgttggctgctccactgtcctctgccagcctacaggaggaaaagcaaggcttacagaaggatgttccttcaggaggaagcagcactaa

SEQ ID NO: 926 - DNA, 306 bp, Homo Sapiens
atgtctgaccaggaggcaaaaccttcaactgaggacttgggggataagaaggaaggtgaatatattaaactcaaagtcattggacaggatagcagtgagattcacttcaaagtgaaaatgacaacacatctcaagaaactcaaagaatcatactgtcaaagacagggtgttccaatgaattcactcaggtttctctttgagggtcagagaattgctgataatcatactccaaaagaactgggaatggaggaagaagatgtgattgaagtttatcaggaacaaacggggggtcattcaacagtttag

SEQ ID NO: 927 - DNA, 2589 bp, Homo Sapiens
atgaatatccaagagcagggtttccccttggacctcggagcaagtttcaccgaagatgctccccgacccccagtgcctggtgaggagggagaactggtgtccacagacccgaggcccgccagctacagtttctgctccgggaaaggtgttggcattaaaggtgagacttcgacggccactccgaggcgctcggatctggacctggggtatgagcctgagggcagtgcctcccccaccccaccatacttgaagtgggctgagtcactgcattccctgctggatgaccaagatgggataagcctgttcaggactttcctgaagcaggagggctgtgccgacttgctggacttctggtttgcctgcactggcttcaggaagctggagccctgtgactcgaacgaggagaagaggctgaagctggcgagagccatctaccgaaagtacattcttgataacaatggcatcgtgtcccggcagaccaagccagccaccaagagcttcataaagggctgcatcatgaagcagctgatcgatcctgccatgtttgaccaggcccagaccgaaatccaggccactatggaggaaaacacctatccctccttccttaagtctgatatttatttggaatatacgaggacaggctcggagagccccaaagtctgtagtgaccagagctctgggtcagggacagggaagggcatatctggatacctgccgaccttaaatgaagatgaggaatggaagtgtgaccaggacatggatgaggacgatggcagagacgctgctccccccggaagactccctcagaagctgctcctggagacagctgccccgagggtctcctccagtagacggtacagcgaaggcagagagttcaggtatggatcctggcgggagccagtcaacccctattatgtcaatgccggctatgccctggccccagccaccagtgccaacgacagcgagcagcagagcctgtccagcgatgcagacaccctgtccctcacggacagcagcgtggatgggatccccccatacaggatccgtaagcagcaccgcagggagatgcaggagagcgtgcaggtcaatgggcgggtgcccctacctcacattccccgcacgtaccgggtgccgaaggaggtccgcgtggagcctcagaagttcgcggaggagctcatccaccgcctggaggctgtgcagcgcacgcgggaggccgaggagaagctggaggagcggctgaagcgcgtgcgcatggaggaggaaggtgaggacggcgatccatcgtcagggcccccagggccgtgtcacaagctgcctcccgcccccgcttggcaccacttcccgccccgctgtgtggacatgggctgtgccgggctccgggatgcacacgaggagaaccctgagagcatcctggacgagcacgtacagcgtgtgctgaggacacctggccgccagtcgcctgggcctggccatcgctccccggacagtgggcacgtggccaagatgccagtggcactggggggtgccgcctcggggcacgggaagcacgtacccaagtcaggggcgaagctggacgcggccggcctgcaccaccaccgacacgtccaccaccacgtccaccacagcacagcccggcccaaggagcaggtggaggccgaggccacccgcagggcccagagcagcttcgcctggggcctggaaccacacagccatggggcaaggtcccgaggctactcagagagtgttggcgctgcccccaacgccagtgatggcctcgcccacagtgggaaggtgggcgtggcgtgcaaaagaaatgccaagaaggctgagtcggggaagagcgccagcaccgaggtgccaggtgcctcggaggatgcggagaagaaccagaaaatcatgcagtggatcattgagggggaaaaggagatcagcaggcaccgcaggaccggccacgggtcttcggggacgaggaagccacagccccatgagaactccagacccttgtcccttgagcacccctgggccggccctcagctccggacctccgtgcagccctcccacctcttcatccaagaccccaccatgccaccccacccagctcccaaccccctaacccagctggaggaggcgcgccgacgtctggaggaggaagaaaagagagccagccgagcaccctccaagcagaggtatgtgcaggaggttatgcggcggggacgcgcctgcgtcaggccagcgtgcgcgccggtgctgcacgtggtaccagccgtgtcggacatggagctctccgagacagagacaagatcgcagaggaaggtgggcggcgggagtgcccagccgtgtgacagcatcgttgtggcgtactacttctgcggggaacccatcccctaccgcaccctggtgaggggccgcgctgtcaccctgggccagttcaaggagctgctgaccaaaaagggcagctacagatactacttcaagaaagtgagcgacgagtttgactgtggggtggtgtttgaggaggttcgagaggacgaggccgtcctgcccgtctttgaggagaagatcatcggcaaagtggagaaggtggactga

SEQ ID NO: 928 - DNA, 663 bp, Homo Sapiens
atggcctctgccggaatgcagatcctgggagtcgtcctgacactgctgggctgggtgaatggcctggtctcctgtgccctgcccatgtggaaggtgaccgctttcatcggcaacagcatcgtggtggcccaggtggtgtgggagggcctgtggatgtcctgcgtggtgcagagcaccggccagatgcagtgcaaggtgtacgactcactgctggcgctgccacaggacctgcaggctgcacgtgccctctgtgtcatcgccctccttgtggccctgttcggcttgctggtctaccttgctggggccaagtgtaccacctgtgtggaggagaaggattccaaggcccgcctggtgctcacctctgggattgtctttgtcatctcaggggtcctgacgctaatccccgtgtgctggacggcgcatgccatcatccgggacttctataaccccctggtggctgaggcccaaaagcgggagctgggggcctccctctacttgggctgggcggcctcaggccttttgttgctgggtggggggttgctgtgctgcacttgcccctcgggggggtcccagggccccagccattacatggcccgctactcaacatctgcccctgccatctctcgggggccctctgagtaccctaccaagaattacgtctga

SEQ ID NO: 929 - DNA, 2457 bp, Homo Sapiens
atgaagaagcagttcaatcgcatgcgccagctggccaaccagacggtgggcagggctgaaaagacagaagttttgagtgaagaccttcttcaggtggagaagcgtctggagctggtgaaacaggtgtcccacagcacgcacaagaagctcaccgcatgtctgcagggccagcaaggggcagaggctgacaagcgctccaaaaagttgcctttgacaacactggctcagtgtctgatggaggggtcagctatcctgggagatgacacacttcttgggaagatgctgaaactctgtggagagacggaggacaagctggctcaggagctgatacattttgagttgcaagtagagagagacgtgattgagcccctgtttttgctggcggaggtggaaatcccaaatattcaaaagcagaggaaacacttagccaagttggtgctggacatggattcctcacgaaccaggtggcagcagacttccaagtcttcaggtttgtccagcagcttacagcctgcgggtgccaaggctgatgccctcagggaagaaatggaagaggctgccaacagagtggagatttgcagggaccagctctcagctgatatgtacagttttgtggccaaagaaattgactatgcaaactactttcaaacgctaatagaagtgcaagctgaataccacaggaagtccctgacactattgcaggctgtattgcctcagatcaaagcacaacaggaggcctgggtagagaagccttccttcgggaagccgctggaggagcacctcaccatcagcggccgggagatcgccttccccatcgaggcgtgtgtgaccatgctgcttgagtgtgggatgcaggaggagggactcttccgagtagccccctctgcctccaaactgaagaagctgaaagcggccctggactgctgcgtggtggatgtgcaggagtactcggcagacccccacgcaattgcaggagctttgaaatcttacctccgagagttgccagaacctcttatgacctttgaactctatgatgagtggatccaggcttccaatgtccaggagcaagacaagaagcttcaggctctatggaatgcttgtgaaaagttgcccaaggccaatcacaacaacatccgatacttgataaaatttttatccaagctgtcagaatatcaagatgtaaacaagatgactcccagtaatatggcaattgttttaggacccaacctcctatggccacaagcagaagggaacattacagagatgatgaccacagtgtcgctgcaaattgttgggatcattgaacctatcatccagcatgcagactggttcttccctggggagatagagttcaacattactggcaattatgggagtccagtacacgtgaaccataatgccaactacagctcaatgccctccccagacatggaccctgctgaccggcgccagcccgagcaggcccgccggcccctcagcgtcgccacggataatatgatgctggagttttacaaaaaggatggccttaggaaaatccaaagcatgggtgtgagggtcatggacacaaactgggtggctcgaagaggctcctcggccggtcggaaagtgtcctgcgccccgccctccatgcagcctcccgccccgcccgccgagctggctgcgcccctgccttcgccgctgccggagcagcccctggacagccccgcggcccccgcgctctctccatccggcctgggcctccagcctgggcccgagcgcaccagcacaacaaaaagcaaggaactttctccaggctctgcacagaaaggaagtccaggctccagccagggcacagcctgtgcagggactcaaccaggggctcaacctggagctcagccgggcgccagccccagccccagccagccgcctgcagaccagagtcctcacaccctccggaaagtttcaaagaagctggcaccgattccacccaaggtcccctttggccagccgggggctatggcagaccagtccgctggccagccgtccccagtcagcctgtcccccaccccgcccagcaccccgtcaccctatggactgagctaccctcaggggtactccttggcctcgggccagctctccccagctgcagctcctcccctggcctctccttctgtctttacaagcactttgagcaaatcgcggcccactcctaagccgcgacagagacctactctgccgcctcctcagcctcccacagtaaacctctcggcctctagtccacagtccacggaggcccccatgctagatggcatgtcccctggggaaagcatgtctacagatcttgtccactttgatattccctcgatccacatagagctcgggtcgacgctccgcctgagtcccctggagcacatgcggcgacactcagtaactgacaagagggactcggaggaggagtctgagagcaccgccctctga

SEQ ID NO: 930 - DNA, 1113 bp, Homo Sapiens
atgtcactgcatcagtttttactagagccaatcacctgtcatgcctggaacagggatcgtactcagattgccctcagtcccaataatcacgaagtgcacatctataagaagaacgggagccagtgggtgaaagctcatgaactcaaggagcacaacggacacatcacaggtattgactgggctcccaagagcgaccgcattgtcacttgtggggcagaccgcaatgcctatgtctggagtcagaaagatggtgtttggaagccaaccctggtgatcctgagaattaatcgcgcagctacttttgtgaagtggtcccccctagagaacaaatttgctgtgggaagtggagcacgactcatttctgtttgttactttgagtctgaaaatgactggtgggtgagcaagcacattaaaaagccgattcgctccacagtcctcagcttggattggcatcccaacaacgttttgctggcagcaggatcatgtgacttcaaatgcagagtgttttctgcctacattaaagaagtggatgaaaagccagccagcacgccctggggcagcaagatgccttttgggcagctgatgtcagagtttggtggcagtggcactggtggctgggtccacggggtaagcttctctgccagtgggagccgcctggcctgggtcagccacgacagcaccgtgtctgttgctgatgcctcaaaaagtgtgcaggtctcgactctgaagacagagttcctgccgctcctaagtgtgtcatttgtctcagagaacagcgtcgtggctgctggccatgactgctgcccaatgctctttaactacgatgaccgcggctgcctgaccttcgtctccaagttagatattccaaaacagagcatccaacgcaacatgtctgccatggaacgcttccgcaacatggacaagagagccacaactgaggaccgcaacacggccttggagacgctgcaccagaatagcatcactcaagtctctatttatgaggtggacaagcaagattgtcgcaaattttgcactactggcatcgatggagccatgacaatttgggatttcaagaccctcgagtcttccatccagggcctccggataatgtga

SEQ ID NO: 931 - DNA, 1506 bp, Homo Sapiens
atggagacaatactggagcagcagcggcgctatcatgaggagaaggaacggctcatggacgtcatggctaaagagatgctcaccaagaagtccacgctccgggaccagatcaattctgatcaccgcactcgggccatgcaagataggtatatggaggtcagtgggaacctgagggatttgtatgatgataaggatggattacgaaaggaggagctcaatgccatttcaggacccaatgagtttgctgaattctataatagactcaagcaaataaaggaattccaccggaagcacccaaatgagatctgtgtgccaatgtcagtggaatttgaggaactcctgaaggctcgagagaatccaagtgaagaggcacaaaacttggtggagttcacagatgaagagggatatggtcgttatctcgatctccatgactgttacctcaagtacattaacctgaaggcatctgagaagctggattatatcacatacctgtccatctttgaccaattatttgacattcctaaagaaaggaagaatgcagagtataagagatacctagagatgctgcttgagtaccttcaggattacacagatagagtgaagcctctccaagatcagaatgaactttttgggaagattcaggctgagtttgagaagaaatgggagaatgggacctttcctggatggccgaaagagacaagcagtgccctgacccatgctggagcccatcttgacctctctgcattctcctcctgggaggagttggcttctctgggtttggacagattgaaatctgctctcttagctttaggcttgaaatgtggcgggaccctagaagagcgagcccagagactattcagtaccaaaggaaagtccctggagtcacttgatacctctttgtttgccaaaaatcccaagtcaaagggcaccaagcgagacactgaaaggaacaaagacattgcttttctagaagcccagatctatgaatatgtagagattctcggggaacagcgacatctcactcatgaaaatgtacagcgcaagcaagccaggacaggagaagagcgagaagaagaggaagaagagcagatcagtgagagtgagagtgaagatgaagagaacgagatcatttacaaccccaaaaacctgccacttggctgggatggcaaacctattccctactggctgtataagcttcatggcctaaatatcaactacaactgtgagatttgtggaaactacacctaccgagggcccaaagccttccagcgacactttgctgaatggcgtcatgctcatggcatgaggtgtttgggcatcccaaacactgctcactttgctaatgtgacacagattgaagatgctgtctccttgtgggccaaactgaaattgcagaaggcttcagaacgatggcagcctgacactgaggaagaatatgaagactcaagtgggaatgttgtgaataagaagacatacgaggatctgaaaagacaaggactgctctag

SEQ ID NO: 932 - DNA, 519 bp, Homo Sapiens
atgagcagctcaggtggggcgcccggggcgtccgccagctctgcgccgcccgcgcaggaagagggcatgacgtggtggtaccgctggctgtgtcgcctgtctggggtgctgggggcagtctcttgcgcgatctctggcctcttcaactgcatcaccatccaccctctgaacattgcggccggcgtgtggatgatcatgaatgccttcatcttgttgctgtgtgaggcgcccttctgctgccagttcatcgagtttgcaaacacagtggcggagaaggtggaccggctgcgctcctggcagaaggctgtcttctactgcgggatggcggtcgttcccatcgtcatcagcctgaccctgaccacgctgctgggcaacgccatcgcctttgctacgggggtgctgtacggactctctgctctgggcaaaaagggcgatgcgatctcctatgccaggatccagcagcagaggcagcaggcggatgaggagaagctcgcggagaccctggagggggagctgtga

SEQ ID NO: 933 - DNA, 4410 bp, Homo Sapiens
atggcccgcctagccgcagtgctctggaatctgtgtgtcaccgccgtcctggtcacctcggccacccaaggcctgagccgggccgggctcccgttcgggctgatgcgccgggagctggcgtgtgaaggctaccccatcgagctgcggtgccccggcagcgacgtcatcatggtggagaatgccaactacgggcgcacggacgacaagatttgcgatgctgaccctttccagatggagaatgtgcagtgctacctgccggacgccttcaagatcatgtcacagaggtgtaacaaccgcacccagtgcgtggtggtcgccggctcggatgcctttcctgacccctgtcctgggacctacaagtacctggaggtgcagtacgactgtgtcccctacatcttcgtgtgcccagggaccctgcagaaggtgctggagcccacctcgacacacgagtcagagcaccagtctggcgcatggtgcaaggacccgctgcaggcgggtgaccgcatctacgtgatgccctggatcccctaccgcacggacacactgactgagtatgcctcgtgggaggactacgtggccgcccgccacaccaccacctaccgcctgcccaaccgcgtggatggcacaggctttgtggtctacgatggtgccgtcttctacaacaaggagcgcacgcgcaacatcgtcaagtatgacctacggacgcgcatcaagagcggggagacggtcatcaataccgccaactaccatgacacctcgccctaccgctggggcggaaagaccgacattgacctggcggtggacgagaacgggctgtgggtcatctacgccactgagggcaacaacgggcggctggtggtgagccagctgaacccctacacactgcgctttgagggcacgtgggagacgggttacgacaagcgctcggcatccaacgccttcatggtgtgtggggtcctgtacgtcctgcgttccgtgtacgtggatgatgacagcgaggcggctggcaaccgcgtggactatgccttcaacaccaatgccaaccgcgaggagcctgtcagcctcaccttccccaacccctaccagttcatctcctccgttgactacaaccctcgcgacaaccagctgtacgtctggaacaactatttcgtggtgcgctacagcctggagttcgggccgcccgaccccagtgctggcccagccacttccccacccctcagcacgaccaccacagccaggcccacgcccctcaccagcacagcctcgcccgcagccaccaccccgctccgccgggcacccctcaccacgcacccagtgggtgccatcaaccagctgggacctgatctgcctccagccacagccccagtccccagcacccggcggcccccagccccgaatctacacgtgtcccctgagctcttctgcgagccccgagaggtacggcgggtccagtggccggccacccagcagggcatgctggtggagaggccctgccccaaggggactcgaggaattgcctccttccagtgtctaccagccttggggctctggaacccccggggccctgacctcagcaactgcacctccccctgggtcaaccaggtggcccagaagatcaagagtggggagaacgcggccaacatcgccagcgagctggcccgacacacccggggctccatctacgcgggggacgtctcctcctctgtgaagctgatggagcagctgctggacatcctggatgcccagctgcaggccctgcggcccatcgagcgcgagtcagccggcaagaactacaacaagatgcacaagcgagagagaacttgtaaggattatatcaaggccgtggtggagacagtggacaatctgctccggccagaagctctggagtcctggaaggacatgaatgccacggagcaggtgcacacggccaccatgctcctcgacgtcctggaggagggcgccttcctgctggccgacaatgtcagggagcctgcccgcttcctggctgccaaggagaacgtggtcctggaggtcacagtcctgaacacagagggccaggtgcaggagctggtgttcccccaggaggagtacccgagaaagaactccatccagctgtctgccaaaaccatcaagcagaacagccgcaatggggtggtcaaagttgtcttcatcctctacaacaacctgggcctcttcctgtccacggagaatgccacagtgaagctggccggcgaagcaggcccgggtggccctgggggcgcctctctagtggtgaactcacaggtcatcgcagcatccatcaacaaggagtccagccgcgtcttcctcatggaccctgtcatcttcaccgtggcccacctggaggacaagaaccacttcaatgctaactgctccttctggaactactcggagcgttccatgctgggctactggtcgacccaaggctgccgcctggtggagtccaacaagacccataccacgtgtgcctgcagccacctcaccaacttcgctgtgctcatggctcaccgtgagatctaccagggccgcatcaacgagctgctgctgtcggtcatcacctgggtgggcattgtgatctccctggtctgcttggccatctgcatctccaccttctgcttcctgcgggggctgcagaccgaccgcaacaccatccacaagaacctgtgcatcaacctcttcctggctgagctgctcttcctggtcgggatcgacaagactcagtatgagattgcctgccccatcttcgccggcctgctgcactatttcttcctggctgccttctcctggctgtgcctggagggcgtgcacctctacctgctactagtggaggtgtttgagagcgagtattcccgcaccaagtactactacctgggtggctactgcttcccggccctggtggtgggcatcgcggctgccattgactaccgcagctacggcaccgagaaggcctgctggctccgagtggacaattacttcatctggagtttcatcgggccagtctccttcgttatcgtggtcaacctggtgttcctcatggtgaccctgcacaagatgatccgaagctcatctgtgctcaagcccgactccagccgcctggacaacattaaatcctgggcgctgggggccatcgcgctgctgttcctgctgggcctcacctgggctttcggcctcctcttcatcaacaaggagtcggtggtcatggcctatctcttcaccaccttcaacgccttccagggggtcttcatcttcgtctttcactgcgccttacagaagaaggtgcacaaggagtacagcaagtgcctgcgtcactcctactgctgcatccgctccccacccgggggcactcacggatccctcaagacctcagccatgcgaagcaacacccgctactacacagggacccagagccgaattcggaggatgtggaatgacactgtgaggaaacagacggagtcctccttcatggcgggtgacatcaacagcacccccaccctgaaccgaggtaccatggggaaccacctgctgaccaaccccgtgctgcagccccgtgggggcaccagtccctacaacaccctcatcgccgagtcagtgggcttcaatccctcctcgccccctgtcttcaactccccagggagctaccgggaacccaagcaccccttgggaggccgggaagcctgtggcatggacaccctgcccctgaacggcaacttcaataacagttactccttgcgaagtggggatttccctcccggggatgggggccctgagccgccccgaggccggaacctagccgatgcggcggcctttgagaagatgatcatctcagagctggtgcacaacaacctgcgggggagcagcagcgcggccaagggccctccaccgcctgagccccctgtgccacctgtgccagggggcgggggcgaggaagaggcgggcgggcccgggggtgctgaccgggccgagattgaacttctctataaggccctggaggagcctctgctgctgccccgggcccagtcggtgctgtaccagagcgatctggacgagtcggagagctgcacggccgaggacggcgccaccagccggcccctctcctcccctcctggccgggactccctctatgccagcggggccaacctgcgggactcaccctcctacccggacagcagccctgaggggcccagtgaggccctgcccccaccccctcccgcaccccccggcccccccgaaatctactacacctcgcgcccgccagccctggtggcccggaatcccctgcagggctactaccaggtgcggcgtcctagccacgagggctacctggcagccccaggccttgaggggccagggcccgatggggacgggcagatgcagctggtcaccagtctctga

SEQ ID NO: 934 - DNA, 612 bp, Homo Sapiens
atggcggaggtgcaggtcctggtgcttgatggtcgaggccatctcctgggccgcctggcggccatcgtggctaaacaggtactgctgggccggaaggtggtggtcgtacgctgtgaaggcatcaacatttctggcaatttctacagaaacaagttgaagtacctggctttcctccgcaagcggatgaacaccaacccttcccgaggcccctaccacttccgggcccccagccgcatcttctggcggaccgtgcgaggtatgctgccccacaaaaccaagcgaggccaggccgctctggaccgtctcaaggtgtttgacggcatcccaccgccctacgacaagaaaaagcggatggtggttcctgctgccctcaaggtcgtgcgtctgaagcctacaagaaagtttgcctatctggggcgcctggctcacgaggttggctggaagtaccaggcagtgacagccaccctggaggagaagaggaaagagaaagccaagatccactaccggaagaagaaacagctcatgaggctacggaaacaggccgagaagaacgtggagaagaaaattgacaaatacacagaggtcctcaagacccacggactcctggtctga

SEQ ID NO: 935 - DNA, 885 bp, Homo Sapiens
atggagtatcccgcgccggccacggtgcaggccgcggacggcggagcggccgggccttacagcagctcggagttgctggagggccaggagccggacggggtgcgctttgaccgcgagagggcgcgccgcctgtgggaagccgtgtccggtgcccagccggtgggtagagaggaagtggagcacatgatccagaagaaccaatgtctcttcaccaacacccagtgtaaggtttgctgcgccttgcttatttctgagtcccagaagctggcacattaccagagcaaaaaacatgccaacaaagtgaagagatacctagcaatccatggaatggagacattaaagggggaaacgaagaagctagactcagatcagaagagcagcagaagcaaagacaagaaccagtgctgccccatctgtaacatgaccttttcctcccctgtcgtggcccagtcgcactacctggggaagacccacgcaaagaacttaaagctgaagcagcagtccactaaggtggaagccttgcaccagaatagagagatgatagacccagacaagttctgcagcctctgccatgcaactttcaacgaccctgtcatggctcaacaacattatgtgggcaagaaacacagaaaacaggagaccaagctcaaactaatggcacgctatgggcggctggcggaccctgctgtcactgactttccagctggaaagggctacccctgcaaaacatgtaagatagtgctgaactccatagaacagtaccaagctcatgtcagcggcttcaaacacaagaaccagtcaccaaaaacagtggcatcatccctgggccagattccaatgcaaaggcaacccattcagaaagactcaaccaccttggaagactag

SEQ ID NO: 936 - DNA, 564 bp, Homo Sapiens
atgtcggaaatggctgagttgtccgagctgtatgaagagagcagtgacctgcagatggatgtgatgcctggcgagggtgaccttccgcagatggaggtaggcagcgggagccgggagctatccctgcgtccctcccgcagcggggcccaacagctcgaggaggaaggcccaatggaggaggaggaggcccagccaatggcggcgccagaggggaaacggagccttgctaacgggcccaacgctggggagcagccaggccaggtggcgggcgcagacttcgagagcgaggacgagggcgaggaatttgatgactgggaggacgactacgactatcccgaagaggagcagctcagtggtgccggctacagagtatcagccgctcttgaagaagccgacaagatgtttctgagaacaagagaaccagccctggatggcgggtttcagatgcattatgagaagaccccgtttgatcagttagcttttatcgaagagcttttttcactgatggttgtcaatcgtctgaccgaagaactcggctgtgatgagattattgatagagagtag

SEQ ID NO: 937 - DNA, 1857 bp, Homo Sapiens
atggagctgctggccgctgccttcagcgccgcctgcgccgtggaccacgacagttccacctcggaaagcgacgcgcgcgactcggcggcgggacacctgcccggcagtgagtcgtcctccaccccgggaaatggggccacgcccgaggagtggccggccctggccgacagccccaccacgctcaccgaggccctgcggatgatccaccccattcccgccgactcctggagaaacctcattgaacaaatagggctcctgtatcaggaataccgagataaatcgactctccaagaaatcgaaaccaggaggcaacaggatgcagaaatagaagacaataccaatgggtccccggccagtgaggacaccccggaggaggaagaagaagaggaggaggaggaggagccggccagcccaccagagaggaagactctgccccagatctgcctgctcagtaacccccactcaaggttcaacctctggcaggatcttcccgagatccggagcagcggggtgcttgagatcctacagcccgaggagattaagctgcaggaggccatgttcgagctggtcacttccgaggcgtcctactacaagagtctgaacctgctcgtgtcccacttcatggagaacgagcggataaggaagatcctgcacccgtccgaggcgcacatcctcttctccaacgtcctggacgtgctggctgtcagtgagcggttcctcctggagctggagcaccggatggaggagaacatcgtcatctctgacgtgtgtgacattgtgtaccgttatgcggccgaccacttctctgtctacatcacctacgtcagcaatcagacctaccaggagcggacctataagcagctgctccaggagaaggcagctttccgggagctgatcgcgcagctagagctcgaccccaagtgcagggggctgcccttctcctccttcctcatcctgcctttccagaggatcacacgcctcaagctgttggtccagaacatcctgaagagggtagaagagaggtctgagcgggagtgcactgctttggatgctcacaaggagctggaaatggtggtgaaggcatgcaacgagggcgtcaggaaaatgagccgcacggaacagatgatcagcattcagaagaagatggagttcaagatcaagtcggtgcccatcatctcccactcccgctggctgctgaagcagggtgagctgcagcagatgtcaggccccaagacctcccggaccctgaggaccaagaagctcttccacgaaatttacctcttcctgttcaacgacctgctggtgatctgccggcagattccaggagacaagtaccaggtatttgactcagctccgcggggactgctgcgtgtggaggagctggaggaccagggccagacgctggccaacgtgttcatcctgcggctgctggagaacgcagatgaccgggaggccacctacatgctaaaggcgtcctctcagagtgagatgaagcgttggatgacctcactggcccccaacaggaggaccaagtttgtttcgttcacatcccggctgctggactgcccccaggtccagtgcgtgcacccatacgtggctcagcagccagacgagctgacgctggagctcgccgacatcctcaacatcctggacaagactgacgacgggtggatctttggcgagcgtctgcacgaccaggagagaggctggttccccagctccatgactgaggagatcttgaatcccaagatccggtcccagaacctcaaggaatgtttccgtgtccacaagatggatgaccctcagcgcagccagaacaaggaccgcaggaagctgggcagccggaatcggcaatga

SEQ ID NO: 938 - DNA, 681 bp, Homo Sapiens
atggagactgtggtgattgttgccataggtgtgctggccaccatctttctggcttcgtttgcagccttggtgctggtttgcaggcagcgctactgccggccgcgagacctgctgcagcgctatgattctaagcccattgtggacctcattggtgccatggagacccagtctgagccctctgagttagaactggacgatgtcgttatcaccaacccccacattgaggccattctggagaatgaagactggatcgaagatgcctcgggtctcatgtcccactgcattgccatcttgaagatttgtcacactctgacagagaagcttgttgccatgacaatgggctctggggccaagatgaagacttcagccagtgtcagcgacatcattgtggtggccaagcggatcagccccagggtggatgatgttgtgaagtcgatgtaccctccgttggaccccaaactcctggacgcacggacgactgccctgctcctgtctgtcagtcacctggtgctggtgacaaggaatgcctgccatctgacgggaggcctggactggattgaccagtctctgtcggctgctgaggagcatttggaagtccttcgagaagcagccctagcttctgagccagataaaggcctcccaggccctgaaggcttcctgcaggagcagtctgcaatttag

SEQ ID NO: 939 - DNA, 2916 bp, Homo Sapiens
atgtccaatgtgtccgaggagagaagaaaaaggcagcagaacattaaggaaggactgcagtttatacagtcaccgctgtcatatccaggaacacaggagcaatatgcggtatatttgcgtgctctcgtgagaaatctttttaatgaaggaaatgacgtttatcgggaacatgattggaacaactcgataagccagtacacggaagccttgaatatagctgattatgcaaaatctgaagaaattttaatccccaaagaaataattgaaaaactatatataaatcgtattgcctgctattctaatatgggtttccatgataaagttttggaggactgcaatatagtcctcagtttaaatgccagtaactgcaaagctctgtatcggaaatctaaggctttaagtgatttaggaagatacaaaaaggcttacgatgctgtagcaaagtgctccttagcagtgcctcaggatgagcatgtaataaaactaactcaagaactagctcagaaattgggatttaaaataagaaaagcgtatgtcagagctgagctctcattaaaatcagttcctggggatggggctaccaaggctttgaaccattctgtggaagatattgagccagatttattaactccaaggcaagaagcagttcctgttgtctctttaccggcacccagtttttctcatgaagttggaagtgagctggcctcagttcctgttatgcccttaacttctattttgccactacaagtggaagagagcgctctgccatctgcagtgctggcaaatggaggaaagatgcccttcactatgccagaagcttttctagatgatggagatatggtccttggagatgaactagatgacctgcttgattctgcacctgaaactaatgaaactgttatgccgtcagctttagtcagaggaccccttcagacagccagtgtctctcctagcatgcccttttcggcatcgctgttaggaaccttacccattggtgcgaggtatgctcctccaccctccttctcagaattttatccacctttgacttcatccttagaagatttttgttcttctttaaattcattttcaatgagtgaatccaaacgagatctgtccacctcaacttctagagagggaacaccgcttaacaacagtaattcttcccttttacttatgaatggaccaggtagtttgtttgcttcagagaatttcctgggaatttcaagtcagcctagaaatgactttggaaacttttttggaagtgcagttaccaaaccatcttcatcagtgactccaagacatcccctcgaaggaacccatgaattgagacaagcttgccagatctgttttgtaaaatcaggccctaagttaatggatttcacttaccatgctaacatagatcataagtgtaagaaagatattttaatcggtaggataaagaatgttgaagataaatcatggaaaaaaatacgtccaagaccaacaaaaacaaattatgaaggaccatattatatatgtaaagatgttgctgctgaggaggaatgtagatattcaggccactgcacgtttgcttattgccaagaggagatagatgtgtggacactggagcggaaaggagcattcagccgggaggctttctttggcggcaatggaaagattaaccttactgtgttcaaacttctccaggagcatcttggggaatttatattcctttgtgagaaatgttttgatcataagcctagaatgataagtaaaagaaataaagataattctactgcttgttctcacccggttacaaagcatgagtttgaagacaataagtgccttgtccacattttgcgagagacaacagtaaaatactccaaaatacgttcttttcatggtcagtgtcagcttgatttatgtcgacatgaagttcggtatggctgtttaagggaagatgagtgcttttatgcccatagtcttgtggaactgaaagtctggataatgcaaaatgaaacaggtatctcacatgatgctattgctcaagagtctaaacgatattggcagaatttggaagcaaatgtacctggagcgcaggtacttggtaatcaaataatgcctggatttcttaatatgaagataaagtttgtgtgcgcccagtgtctgagaaacggtcaagtcattgaaccagacaaaaacagaaaatattgtagtgcaaaagcaaggcattcgtggaccaaagaccggcgtgcgatgagagtgatgtctattgaacgtaagaagtggatgaacatccgtcctctccccacaaagaaacaaatgcctttacagtttgatctgtgcaaccatattgcttctgggaaaaaatgtcaatatgttggaaactgttcctttgctcatagtcctgaggaaagagaagtttggacttacatgaaggagaatgggatacaagatatggagcaattttacgaactatggctcaagagtcaaaaaaatgaaaaaagtgaagacatagccagtcagtcaaacaaggaaaatggaaaacaaattcacatgccaacagattatgctgaagttacagtggactttcactgctggatgtgtgggaaaaactgcaacagtgagaagcagtggcagggccacatctcctccgagaagcacaaagagaaggttttccacaccgaggacgaccagtactgctggcagcaccgcttcccaacaggctatttcagtatttgtgataggtatatgaatggcacctgcccagaaggaaacagctgtaaatttgcacatggaaatgccgaacttcatgaatgggaagaaagaagagatgccctaaagatgaagctcaacaaagcacgaaaagatcacttaattggcccaaatgataatgactttggaaaatatagttttttgtttaaagatttaaactaa

SEQ ID NO: 940 - DNA, 552 bp, Homo Sapiens
atggaacagcggttagctgagtttcgggcggcgcggaaacgggcgggtctggcggcccaaccccctgctgccagtcagggcgcacaaaccccaggagagaaggcggaagcagcagcgactctaaaggcagccccaggctggctaaagcggttcctggtatggaaacctaggcccgcgagtgcccgggcccagcccggcctagttcaggaagcggctcagccccagggcagcacatcagagacaccatggaacacagccattcctctgccgtcgtgctgggaccagtctttcctgaccaatatcaccttcttgaaggttcttctctggttggtcctgctgggactgtttgtggaactggaatttggcctggcatattttgtcctgtccttgttctattggatgtacgtcgggacacgaggccctgaagagaagaaagagggagagaagagcgcctactctgtgttcaatccaggctgtgaagccatccagggcaccctgactgcagagcagttggagcgcgagttacagttgagacccctggcagggagatag

SEQ ID NO: 941 - DNA, 606 bp, Homo Sapiens
atggcgatgcacaacaaggcggcgccgccgcagatcccggacacccggcgggagctggcggagctcgtgaagcggaagcaggagctggcggaaacattggcaaatttggagcgacagatctatgcttttgagggaagctacctggaagacactcagatgtatggcaatattattcgtggctgggatcggtatctgaccaaccaaaaaaactccaatagcaaaaatgatcgaaggaaccggaagtttaaggaagctgagcggctcttcagtaaatcctcggttacctcagcagctgcagtaagtgcattggcaggagttcaggaccagctcattgaaaagagggagccaggaagtgggacggaaagtgacacttctccagacttccacaatcaggaaaatgagcccagccaggaggaccctgaggatctggatggatctgtgcagggagtgaaacctcagaaggctgcttcttctacttcctcagggagtcaccacagcagccataaaaagcgaaagaataaaaaccggcacagcccgtctggcatgtttgattatgactttgagattgatctgaagttaaacaaaaaaccacgagctgactattag

SEQ ID NO: 942 - DNA, 378 bp, Homo Sapiens
atgccccgctacgagctggctttaatcctgaaagccatgcagcggccagagactgctgctactttgaaacgtacgatagaggccctgatggacagaggagcaatagtgagggacttggaaaacctgggtgaacgagcgcttccttataggatctctgcccacagtcagcagcacaacagaggcgggtatttcttggtggatttttatgcacccaccgcagctgttgaaagcatggtggagcacttgtctcgagatatagatgtgattagagggaatattgtcaaacaccctctgacccaggaactaaaagaatgtgaagggattgtcccagtcccactcgcagaaaaattatattccacaaagaagaggaagaagtga

SEQ ID NO: 943 - DNA, 1473 bp, Homo Sapiens
atgacatctagggcctctgaactttctccggggcgcagcgtgacggctggcatcatcattgttggagatgagatccttaagggacacactcaggacaccaacaccttctttctgtgccggacactgcgctccctaggggtccaggtttgccgagtctcagttgtacctgatgaggtagccaccattgcagctgaggtcacttctttctccaaccgcttcacccatgtcctcacagcagggggcatcggccccactcatgatgatgtgacctttgaggcagtggcacaggcctttggagatgagctgaagccacaccccaagttggaagcagccaccaaagccctaggaggggaaggctgggagaagctatcattggtgccctcctctgcccgcctgcattatggcacagatccttgcactggtcaacctttcagattccctctggtctccgtccgaaacgtctacctcttcccaggcattccagagctgctgcggcgggtgctggaggggatgaagggactattccaaaacccagctgttcagttccactcaaaggagctatatgtggctgctgatgaagcctccatcgcccccattctggctgaggcccaggcccactttggacgtaggcttggcctgggttcctaccctgactggggcagcaactactatcaggtgaagctgactctagactcagaggaagaaggacccctggaggaatgcttggcctacctgactgcccgtttgccccagggatcgctggtcccctacatgcccaacgctgtggagcaggccagtgaggctgtatacaaactcgctgaatcagggtcttctttggggaaaaaggtggcaggtgccctacagaccattgagacctccctggctcagtacagcctcacccagctctgtgtgggcttcaacgggggcaaagactgcactgccctcctgcacctcttccatgcagctgtgcagaggaaattacctgatgttccaaaccccctccagatcctgtatatccgcagcatctcccctttccctgagctggaacagtttctacaggacactatcaagaggtataatctgcagatgttggaagctgagggcagcatgaagcaggccctgggtgaactgcaggcacggcacccccagctggaggctgtccttatgggcacccgccggactgacccctactcctgtagcctctgccctttcagccccactgacccaggctggcccgcattcatgcgcatcaacccactgctggactggacctacagagacatctgggattttctgcgtcagctgtttgtcccatactgtatcctgtatgaccgaggatacacatcactggggagtcgggagaataccgtgcggaacccggccctgaagtgcctgagcccaggaggacaccccacataccgtccagcctatctactggagaacgaagaagaggagcggaactcccgcacatga

SEQ ID NO: 944 - DNA, 585 bp, Homo Sapiens
atggcaaaacagaagagaaaagttcctgaagtgacagagaaaaagaacaaaaagctgaagaaggcgtcagcagaggggccactgctgggccctgaggctgcaccaagtggcgaaggagccggctccaagggcgaagctgtgctcaggcccgggctggacgcagagccagagctgtccccagaggagcagagggtcctggaaaggaagctgaaaaaggaacggaagaaagaggagaggcagcgtctgcgggaggcaggccttgtggcccagcacccgcctgccaggcgctcgggggccgaactggccctggactacctctgcagatgggcccaaaagcacaagaactggaggtttcagaagacgaggcagacgtggctcctgctgcacatgtatgacagtgacaaggttcccgatgagcacttctccaccctgctggcctacctggaggggctgcagggccgggcccgagagctgacggtgcagaaggcggaagccctgatgcgggagctggatgaggagggctctgatccccccctgccggggagggcccagcgcatccgacaggtgctgcagctgctctcctag

SEQ ID NO: 945 - DNA, 603 bp, Homo Sapiens
atggaacagaccgaagtgctgaagccacggaccctggctgatctgatccgcatcctgcaccagctctttgccggcgatgaggtcaatgtagaggaggtgcaggccatcatggaagcctacgagagcgaccccaccgagtgggcaatgtacgccaagttcgaccagtacaggtatacccgaaatcttgtggatcaaggaaatggaaaatttaatctgatgattctctgttggggtgaaggacatggcagcagtattcatgatcataccaactcccactgctttctgaagatgctacagggaaatctaaaggagacattatttgcctggcctgacaaaaaatccaatgagatggtcaagaagtctgaaagagtcttgagggaaaaccagtgtgcctacatcaatgattccattggcttacatcgagtagagaacatcagccatacggaacctgctgtgagccttcacttgtacagtccaccttttgatacatgccatgcctttgatcaaagaacaggacataaaaacaaagtcacaatgacattccatagtaaatttggaatcagaactccaaatgcaacttcgggctcgctggagaacaactaa

SEQ ID NO: 946 - DNA, 3573 bp, Homo Sapiens
atgaagacacgacagaataaagactcgatgtcaatgaggagtggacggaagaaagaggcccctgggccccgggaagaactgagatcgaggggccgggcctcccctggaggggtcagcacgtccagcagtgatggcaaagctgagaagtccaggcagacagccaagaaggcccgagtagaggaagcctccaccccaaaggtcaacaagcagggtcggagtgaggagatctcagagagtgaaagtgaggagaccaatgcaccaaaaaagaccaaaactgagcaggaactccctcggccacagtctccctccgatctggatagcttggacgggcggagccttaatgatgatggcagcagcgaccctagggatatcgaccaggacaaccgaagcacgtcccccagtatctacagccctggaagtgtggagaatgactctgactcatcttctggcctgtcccagggcccagcccgcccctaccacccacctccactctttcctccttcccctcaaccgccagacagcacccctcgacagccagaggctagctttgaaccccatccttctgtgacacccactggatatcatgctcccatggagccccccacatctcgaatgttccaggctcctcctggggcccctccccctcacccacagctctatcctgggggcactggtggagttttgtctggacccccaatgggtcccaaggggggaggggctgcctcatcagtggggggccctaatgggggtaagcagcaccccccacccactactcccatttcagtatcaagctctggggctagtggtgctcccccaacaaagccgcctaccactccagtgggtggtgggaacctaccttctgctccaccaccagccaacttcccccatgtgacaccgaacctgcctcccccacctgccctgagacccctcaacaatgcatcagcctctccccctggcctgggggcccaaccactacctggtcatctgccctctccccacgccatgggacagggtatgggtggacttcctcctggcccagagaagggcccaactctggctccttcaccccactctctgcctcctgcttcctcttctgctccagcgccccccatgaggtttccttattcatcctctagtagtagctctgcagcagcctcctcttccagttcttcctcctcttcctctgcctcccccttcccagcttcccaggcattgcccagctacccccactctttccctcccccaacaagcctctctgtctccaatcagccccccaagtatactcagccttctctcccatcccaggctgtgtggagccagggtcccccaccacctcctccctatggccgcctcttagccaacagcaatgcccatccaggccccttccctccctctactggggcccagtccaccgcccacccaccagtctcaacacatcaccatcaccaccagcaacagcaacagcagcagcagcagcagcagcagcagcagcagcagcagcagcagcatcacggaaactctgggccccctcctcctggagcatttccccacccactggagggcggtagctcccaccacgcacacccttacgccatgtctccctccctggggtctctgaggccctacccaccagggccagcacacctgcccccacctcacagccaggtgtcctacagccaagcaggccccaatggccctccagtctcttcctcttccaactcttcctcttccacttctcaagggtcctacccatgttcacacccctccccttcccagggccctcaaggggcgccctaccctttcccaccggtgcctacggtcaccacctcttcggctaccctttccacggtcattgccaccgtggcttcctcgccagcaggctacaaaacggcctccccacctgggcccccaccgtacggaaagagagccccgtccccgggggcctacaagacagccaccccacccggatacaaacccgggtcgcctccctccttccgaacggggaccccaccgggctatcgaggaacctcgccacctgcaggcccagggaccttcaagccgggctcgcccaccgtgggacctgggcccctgccacctgcggggccctcaggcctgccatcgctgccaccaccacctgcggcccctgcctcagggccgcccctgagcgccacgcagatcaaacaggagccggctgaggagtatgagacccccgagagcccggtgcccccagcccgcagcccctcgccccctcccaaggtggtagatgtacccagccatgccagtcagtctgccaggttcaacaaacacctggatcgcggcttcaactcgtgcgcgcgcagcgacctgtacttcgtgccactggagggctccaagctggccaagaagcgggccgacctggtggagaaggtgcggcgcgaggccgagcagcgcgcgcgcgaagaaaaggagcgcgagcgcgagcgggaacgcgagaaagagcgcgagcgcgagaaggagcgcgagcttgaacgcagcgtgaagttggctcaggagggccgtgctccggtggaatgcccatctctgggcccagtgccccatcgccctccatttgaaccgggcagtgcggtggctacagtgcccccctacctgggtcctgacactccagccttgcgcactctcagtgaatatgcccggcctcatgtcatgtctcctggcaatcgcaaccatccattctacgtgcccctgggggcagtggacccggggctcctgggttacaatgtcccggccctgtacagcagtgatccagctgcccgggagagggaacgggaagcccgtgaacgagacctccgtgaccgcctcaagcctggctttgaggtgaagcctagtgagctggaacccctacatggggtccctgggccgggcttggatccctttccccgacatgggggcctggctctgcagcctggcccacctggcctgcaccctttcccctttcatccgagcctggggcccctggagcgagaacgtctagcgctggcagctgggccagccctgcggcctgacatgtcctatgctgagcggctggcagctgagaggcagcacgcagaaagggtggcggccctgggcaatgacccactggcccggctgcagatgctcaatgtgactccccatcaccaccagcactcccacatccactcgcacctgcacctgcaccagcaagatgctatccatgcagcctctgcctcggtgcaccctctcattgaccccctggcctcagggtctcaccttacccggatcccctacccagctggaactctccctaaccccctgcttcctcaccctctgcacgagaacgaagttcttcgtcaccagctctttgctgccccttaccgggacctgccggcctccctttctgccccgatgtcagcagctcatcagctgcaggccatgcacgcacagtcagctgagctgcagcgcttggcgctggaacagcagcagtggctgcatgcccatcacccgctgcacagtgtgccgctgcctgcccaggaggactactacagtcacctgaagaaggaaagcgacaagccactgtag

SEQ ID NO: 947 - DNA, 873 bp, Homo Sapiens
atggccgccctgcgtgtcctgctgtcctgcgtccgcggcccgctgaggcccccggttcgctgtcccgcctggcgtcccttcgcctcgggtgctaactttgagtacatcatcgcagaaaaaagagggaagaataacaccgtggggttgatccaactgaaccgccccaaggccctcaatgcactttgcgatggcctgattgacgagctcaaccaggccctgaagaccttcgaggaggacccggccgtgggggccattgtcctcaccggcggggataaggcctttgcagctggagctgatatcaaggaaatgcagaacctgagtttccaggactgttactccagcaagttcttgaagcactgggaccacctcacccaggtcaagaagccagtcatcgctgctgtcaatggctatgcctttggcgggggctgtgagcttgccatgatgtgtgatatcatctatgccggtgagaaggcccagtttgcacagccggagatcttaataggaaccatcccaggtgcgggcggcacccagagactcacccgtgctgttgggaagtcgctggcgatggagatggtcctcactggtgaccggatctcagcccaggacgccaagcaagcaggtcttgtcagcaagatttgtcctgttgagacactggtggaagaagccatccagtgtgcagaaaaaattgccagcaattctaaaattgtagtagcgatggccaaagaatcagtgaatgcagcttttgaaatgacattaacagaaggaagtaagttggagaagaaactcttttattcaacctttgccactgatgaccggaaagaagggatgaccgcgtttgtggaaaagagaaaggccaacttcaaagaccagtga

SEQ ID NO: 948 - DNA, 7920 bp, Homo Sapiens
atgagtagctcccactctcgggcgggccagagcgcagcaggcgcggctccgggcggcggcgtcgacacgcgggacgccgagatgccggccaccgagaaggacctggcggaggacgcgccgtggaagaagatccagcagaacactttcacgcgctggtgcaacgagcacctgaagtgcgtgagcaagcgcatcgccaacctgcagacggacctgagcgacgggctgcggcttatcgcgctgttggaggtgctcagccagaagaagatgcaccgcaagcacaaccagcggcccactttccgccaaatgcagcttgagaacgtgtcggtggcgctcgagttcctggaccgcgagagcatcaaactggtgtccatcgacagcaaggccatcgtggacgggaacctgaagctgatcctgggcctcatctggaccctgatcctgcactactccatctccatgcccatgtgggacgaggaggaggatgaggaggccaagaagcagacccccaagcagaggctcctgggctggatccagaacaagctgccgcagctgcccatcaccaacttcagccgggactggcagagcggccgggccctgggcgccctggtggacagctgtgccccgggcctgtgtcctgactgggactcttgggacgccagcaagcccgttaccaatgcgcgagaggccatgcagcaggcggatgactggctgggcatcccccaggtgatcacccccgaggagattgtggaccccaacgtggacgagcactctgtcatgacctacctgtcccagttccccaaggccaagctgaagccaggggctcccttgcggcccaaactgaacccgaagaaagcccgtgcctacgggccaggcatcgagcccacaggcaacatggtgaagaagcgggcagagttcactgtggagaccagaagtgctggccagggagaggtgctggtgtacgtggaggacccggccggacaccaggaggaggcaaaagtgaccgccaataacgacaagaaccgcaccttctccgtctggtacgtccccgaggtgacggggactcataaggttactgtgctctttgctggccagcacatcgccaagagccccttcgaggtgtacgtggataagtcacagggtgacgccagcaaagtgacagcccaaggtcccggcctggagcccagtggcaacatcgccaacaagaccacctactttgagatctttacggcaggagctggcacgggcgaggtcgaggttgtgatccaggaccccatgggacagaagggcacggtagagcctcagctggaggcccggggcgacagcacataccgctgcagctaccagcccaccatggagggcgtccacaccgtgcacgtcacgtttgccggcgtgcccatccctcgcagcccctacactgtcactgttggccaagcctgtaacccgagtgcctgccgggcggttggccggggcctccagcccaagggtgtgcgggtgaaggagacagctgacttcaaggtgtacacaaagggcgctggcagtggggagctgaaggtcaccgtgaagggccccaagggagaggagcgcgtgaagcagaaggacctgggggatggcgtgtatggcttcgagtattaccccatggtccctggaacctatatcgtcaccatcacgtggggtggtcagaacatcgggcgcagtcccttcgaagtgaaggtgggcaccgagtgtggcaatcagaaggtacgggcctggggccctgggctggagggcggcgtcgttggcaagtcagcagactttgtggtggaggctatcggggacgacgtgggcacgctgggcttctcggtggaagggccatcgcaggctaagatcgaatgtgacgacaagggcgacggctcctgtgatgtgcgctactggccgcaggaggctggcgagtatgccgttcacgtgctgtgcaacagcgaagacatccgcctcagccccttcatggctgacatccgtgacgcgccccaggacttccacccagacagggtgaaggcacgtgggcctggattggagaagacaggtgtggccgtcaacaagccagcagagttcacagtggatgccaagcacggtggcaaggccccacttcgggtccaagtccaggacaatgaaggctgccctgtggaggcgttggtcaaggacaacggcaatggcacttacagctgctcctacgtgcccaggaagccggtgaagcacacagccatggtgtcctggggaggcgtcagcatccccaacagccccttcagggtgaatgtgggagctggcagccaccccaacaaggtcaaagtatacggccccggagtagccaagacagggctcaaggcccacgagcccacctacttcactgtggactgcgccgaggctggccagggggacgtcagcatcggcatcaagtgtgcccctggagtggtaggccccgccgaagctgacatcgacttcgacatcatccgcaatgacaatgacaccttcacggtcaagtacacgccccggggggctggcagctacaccattatggtcctctttgctgaccaggccacgcccaccagccccatccgagtcaaggtggagccctctcatgacgccagtaaggtgaaggccgagggccctggcctcagtcgcactggtgtcgagcttggcaagcccacccacttcacagtaaatgccaaagctgctggcaaaggcaagctggacgtccagttctcaggactcaccaagggggatgcagtgcgagatgtggacatcatcgaccaccatgacaacacctacacagtcaagtacacgcctgtccagcagggtccagtaggcgtcaatgtcacttatggaggggatcccatccctaagagccctttctcagtggcagtatctccaagcctggacctcagcaagatcaaggtgtctggcctgggagagaaggtggacgttggcaaagaccaggagttcacagtcaaatcaaagggtgctggtggtcaaggcaaagtggcatccaagattgtgggcccctcgggtgcagcggtgccctgcaaggtggagccaggcctgggggctgacaacagtgtggtgcgcttcctgccccgtgaggaagggccctatgaggtggaggtgacctatgacggcgtgcccgtgcctggcagcccctttcctctggaagctgtggcccccaccaagcctagcaaggtgaaggcgtttgggccggggctgcagggaggcagtgcgggctcccccgcccgcttcaccatcgacaccaagggcgccggcacaggtggcctgggcctgacggtggagggcccctgtgaggcgcagctcgagtgcttggacaatggggatggcacatgttccgtgtcctacgtgcccaccgagcccggggactacaacatcaacatcctcttcgctgacacccacatccctggctccccattcaaggcccacgtggttccctgctttgacgcatccaaagtcaagtgctcaggccccgggctggagcgggccaccgctggggaggtgggccaattccaagtggactgctcgagcgcgggcagcgcggagctgaccattgagatctgctcggaggcggggcttccggccgaggtgtacatccaggaccacggtgatggcacgcacaccattacctacattcccctctgccccggggcctacaccgtcaccatcaagtacggcggccagcccgtgcccaacttccccagcaagctgcaggtggaacctgcggtggacacttccggtgtccagtgctatgggcctggtattgagggccagggtgtcttccgtgaggccaccactgagttcagtgtggacgcccgggctctgacacagaccggagggccgcacgtcaaggcccgtgtggccaacccctcaggcaacctgacggagacctacgttcaggaccgtggcgatggcatgtacaaagtggagtacacgccttacgaggagggactgcactccgtggacgtgacctatgacggcagtcccgtgcccagcagccccttccaggtgcccgtgaccgagggctgcgacccctcccgggtgcgtgtccacgggccaggcatccaaagtggcaccaccaacaagcccaacaagttcactgtggagaccaggggagctggcacgggcggcctgggcctggctgtagagggcccctccgaggccaagatgtcctgcatggataacaaggacggcagctgctcggtcgagtacatcccttatgaggctggcacctacagcctcaacgtcacctatggtggccatcaagtgccaggcagtcctttcaaggtccctgtgcatgatgtgacagatgcgtccaaggtcaagtgctctgggcccggcctgagcccaggcatggttcgtgccaacctccctcagtccttccaggtggacacaagcaaggctggtgtggccccattgcaggtcaaagtgcaagggcccaaaggcctggtggagccagtggacgtggtagacaacgctgatggcacccagaccgtcaattatgtgcccagccgagaagggccctacagcatctcagtactgtatggagatgaagaggtaccccggagccccttcaaggtcaaggtgctgcctactcatgatgccagcaaggtgaaggccagtggccccgggctcaacaccactggcgtgcctgccagcctgcccgtggagttcaccatcgatgcaaaggacgccggggagggcctgctggctgtccagatcacggatcccgaaggcaagccgaagaagacacacatccaagacaaccatgacggcacgtatacagtggcctacgtgccagacgtgacaggtcgctacaccatcctcatcaagtacggtggtgacgagatccccttctccccgtaccgcgtgcgtgccgtgcccaccggggacgccagcaagtgcactgtcacaggtgctggcatcggccccaccattcagattggggaggagacggtgatcactgtggacactaaggcggcaggcaaaggcaaagtgacgtgcaccgtgtgcacgcctgatggctcagaggtggatgtggacgtggtggagaatgaggacggcactttcgacatcttctacacggccccccagccgggcaaatacgtcatctgtgtgcgctttggtggcgagcacgtgcccaacagccccttccaagtgacggctctggctggggaccagccctcggtgcagccccctctacggtctcagcagctggccccacagtacacctacgcccagggcggccagcagacttgggccccggagaggcccctggtgggtgtcaatgggctggatgtgaccagcctgaggccctttgaccttgtcatccccttcaccatcaagaagggcgagatcacaggggaggttcggatgccctcaggcaaggtggcgcagcccaccatcactgacaacaaagacggcaccgtgaccgtgcggtatgcacccagcgaggctggcctgcacgagatggacatccgctatgacaacatgcacatcccaggaagccccttgcagttctatgtggattacgtcaactgtggccatgtcactgcctatgggcctggcctcacccatggagtagtgaacaagcctgccaccttcaccgtcaacaccaaggatgcaggagaggggggcctgtctctggccattgagggcccgtccaaagcagaaatcagctgcactgacaaccaggatgggacatgcagcgtgtcctacctgcctgtgctgccgggggactacagcattctagtcaagtacaatgaacagcacgtcccaggcagccccttcactgctcgggtcacaggtgacgactccatgcgtatgtcccacctaaaggtcggctctgctgccgacatccccatcaacatctcagagacggatctcagcctgctgacggccactgtggtcccgccctcgggccgggaggagccctgtttgctgaagcggctgcgtaatggccacgtggggatttcattcgtgcccaaggagacgggggagcacctggtgcatgtgaagaaaaatggccagcacgtggccagcagccccatcccggtggtgatcagccagtcggaaattggggatgccagtcgtgttcgggtctctggtcagggccttcacgaaggccacacctttgagcctgcagagtttatcattgatacccgcgatgcaggctatggtgggctcagcctgtccattgagggccccagcaaggtggacatcaacacagaggacctggaggacgggacgtgcagggtcacctactgccccacagagccaggcaactacatcatcaacatcaagtttgccgaccagcacgtgcctggcagccccttctctgtgaaggtgacaggcgagggccgggtgaaagagagcatcacccgcaggcgtcgggctccttcagtggccaacgttggtagtcattgtgacctcagcctgaaaatccctgaaattagcatccaggatatgacagcccaggtgaccagcccatcgggcaagacccatgaggccgagatcgtggaaggggagaaccacacctactgcatccgctttgttcccgctgagatgggcacacacacagtcagcgtgaagtacaagggccagcacgtgcctgggagccccttccagttcaccgtggggcccctaggggaagggggagcccacaaggtccgagctgggggccctggcctggagagagctgaagctggagtgccagccgaattcagtatctggacccgggaagctggtgctggaggcctggccattgctgtcgagggccccagcaaggctgagatctcttttgaggaccgcaaggacggctcctgtggtgtggcttatgtggtccaggagccaggtgactacgaagtctcagtcaagttcaacgaggaacacattcccgacagccccttcgtggtgcctgtggcttctccgtctggcgacgcccgccgcctcactgtttctagccttcaggagtcagggctaaaggtcaaccagccagcctcttttgcagtcagcctgaacggggccaagggggcgatcgatgccaaggtgcacagcccctcaggagccctggaggagtgctatgtcacagaaattgaccaagataagtatgctgtgcgcttcatccctcgggagaatggcgtttacctgattgacgtcaagttcaacggcacccacatccctggaagccccttcaagatccgagttggggagcctgggcatggaggggacccaggcttggtgtctgcttacggagcaggtctggaaggcggtgtcacagggaacccagctgagttcgtcgtgaacacgagcaatgcgggagctggtgccctgtcggtgaccattgacggcccctccaaggtgaagatggattgccaggagtgccctgagggctaccgcgtcacctatacccccatggcacctggcagctacctcatctccatcaagtacggcggcccctaccacattgggggcagccccttcaaggccaaagtcacaggcccccgtctcgtcagcaaccacagcctccacgagacatcatcagtgtttgtagactctctgaccaaggccacctgtgccccccagcatggggccccgggtcctgggcctgctgacgccagcaaggtggtggccaagggcctggggctgagcaaggcctacgtaggccagaagagcagcttcacagtagactgcagcaaagcaggcaacaacatgctgctggtgggggttcatggcccaaggaccccctgcgaggagatcctggtgaagcacgtgggcagccggctctacagcgtgtcctacctgctcaaggacaagggggagtacacactggtggtcaaatggggggacgagcacatcccaggcagcccctaccgcgttgtggtgccctga

SEQ ID NO: 949 - DNA, 2196 bp, Homo Sapiens
atggtggtggaacaccccgagttcctcaaggcagggaaggagcctggcctgcagatctggcgtgtggagaagttcgatctggtgcccgtgcccaccaacctttatggagacttcttcacgggcgacgcctacgtcatcctgaagacagtgcagctgaggaacggaaatctgcagtatgacctccactactggctgggcaatgagtgcagccaggatgagagcggggcggccgccatctttaccgtgcagctggatgactacctgaacggccgggccgtgcagcaccgtgaggtccagggcttcgagtcggccaccttcctaggctacttcaagtctggcctgaagtacaagaaaggaggtgtggcatcaggattcaagcacgtggtacccaacgaggtggtggtgcagagactcttccaggtcaaagggcggcgtgtggtccgtgccaccgaggtacctgtgtcctgggagagcttcaacaatggcgactgcttcatcctggacctgggcaacaacatccaccagtggtgtggttccaacagcaatcggtatgaaagactgaaggccacacaggtgtccaagggcatccgggacaacgagcggagtggccgggcccgagtgcacgtgtctgaggagggcactgagcccgaggcgatgctccaggtgctgggccccaagccggctctgcctgcaggtaccgaggacaccgccaaggaggatgcggccaaccgcaagctggccaagctctacaaggtctccaatggtgcagggaccatgtccgtctccctcgtggctgatgagaaccccttcgcccagggggccctgaagtcagaggactgcttcatcctggaccacggcaaagatgggaaaatctttgtctggaaaggcaagcaggcaaacacggaggagaggaaggctgccctcaaaacagcctctgacttcatcaccaagatggactaccccaagcagactcaggtctcggtccttcctgagggcggtgagaccccactgttcaagcagttcttcaagaactggcgggacccagaccagacagatggcctgggcttgtcctacctttccagccatatcgccaacgtggagcgggtgcccttcgacgccgccaccctgcacacctccactgccatggccgcccagcacggcatggatgacgatggcacaggccagaaacagatctggagaatcgaaggttccaacaaggtgcccgtggaccctgccacatatggacagttctatggaggcgacagctacatcattctgtacaactaccgccatggtggccgccaggggcagataatctataactggcagggtgcccagtctacccaggatgaggtcgctgcatctgccatcctgactgctcagctggatgaggagctgggaggtacccctgtccagagccgtgtggtccaaggcaaggagcccgcccacctcatgagcctgtttggtgggaagcccatgatcatctacaagggcggcacctcccgcgagggcgggcagacagcccctgccagcacccgcctcttccaggtccgcgccaacagcgctggagccacccgggctgttgaggtattgcctaaggctggtgcactgaactccaacgatgcctttgttctgaaaaccccctcagccgcctacctgtgggtgggtacaggagccagcgaggcagagaagacgggggcccaggagctgctcagggtgctgcgggcccaacctgtgcaggtggcagaaggcagcgagccagatggcttctgggaggccctgggcgggaaggctgcctaccgcacatccccacggctgaaggacaagaagatggatgcccatcctcctcgcctctttgcctgctccaacaagattggacgttttgtgatcgaagaggttcctggtgagctcatgcaggaagacctggcaacggatgacgtcatgcttctggacacctgggaccaggtctttgtctgggttggaaaggattctcaagaagaagaaaagacagaagccttgacttctgctaagcggtacatcgagacggacccagccaatcgggatcggcggacgcccatcaccgtggtgaagcaaggctttgagcctccctcctttgtgggctggttccttggctgggatgatgattactggtctgtggaccccttggacagggccatggctgagctggctgcctga

SEQ ID NO: 950 - DNA, 1194 bp, Homo Sapiens
atggtgaaagaaacaacttactacgatgttttgggggtcaaacccaatgctactcaggaagaattgaaaaaggcttataggaaactggctttgaagtaccatcctgataagaacccaaatgaaggagagaagtttaaacagatttctcaagcttacgaagttctctctgatgcaaagaaaagggaattatatgacaaaggaggagaacaggcaattaaagagggtggagcaggtggcggttttggctcccccatggacatctttgatatgttttttggaggaggaggaaggatgcagagagaaaggagaggtaaaaatgttgtacatcagctctcagtaaccctagaagacttatataatggtgcaacaagaaaactggctctgcaaaagaatgtgatttgtgacaaatgtgaaggtagaggaggtaagaaaggagcagtagagtgctgtcccaattgccgaggtactggaatgcaaataagaattcatcagataggacctggaatggttcagcaaattcagtctgtgtgcatggagtgccagggccatggggagcggatcagtcctaaagatagatgtaaaagctgcaacggaaggaagatagttcgagagaagaaaattttagaagttcatattgacaaaggcatgaaagatggccagaagataacattccatggtgaaggagaccaagaaccaggactggagccaggcgatattatcattgtgttagatcagaaggaccatgctgtttttactcgacgaggagaagaccttttcatgtgtatggacatacagctcgttgaagcactgtgtggcttccagaagccaatatctactcttgacaaccgaaccatcgtcatcacctctcatccaggtcagattgtcaagcatggagatatcaagtgtgtactaaatgaaggcatgccaatttatcgtagaccatatgaaaagggtcgcctaatcatcgaatttaaggtaaactttcctgagaatggctttctctctcctgataaactgtctttgctggaaaaactcctacccgagaggaaggaagtggaagagactgatgagatggaccaagtagaactggtggactttgatccaaatcaggaaagacggcgccactacaatggagaagcatatgaggatgatgaacatcatcccagaggtggtgttcagtgtcagacctcttaa

SEQ ID NO: 951 - DNA, 1590 bp, Homo Sapiens
atgtccaccaacgagaatgctaatacaccagctgcccgtcttcacagattcaagaacaagggaaaagacagtacagaaatgaggcgtcgcagaatagaggtcaatgtggagctgaggaaagctaagaaggatgaccagatgctgaagaggagaaatgtaagctcatttcctgatgatgctacttctccgctgcaggaaaaccgcaacaaccagggcactgtaaattggtctgttgatgacattgtcaaaggcataaatagcagcaatgtggaaaatcagctccaagctactcaagctgccaggaaactactttccagagaaaaacagccccccatagacaacataatccgggctggtttgattccgaaatttgtgtccttcttgggcagaactgattgtagtcccattcagtttgaatctgcttgggcactcactaacattgcttctgggacatcagaacaaaccaaggctgtggtagatggaggtgccatcccagcattcatttctctgttggcatctccccatgctcacatcagtgaacaagctgtctgggctctaggaaacattgcaggtgatggctcagtgttccgagacttggttattaagtacggtgcagttgacccactgttggctctccttgcagttcctgatatgtcatctttagcatgtggctacttacgtaatcttacctggacactttctaatctttgccgcaacaagaatcctgcacccccgatagatgctgttgagcagattcttcctaccttagttcggctcctgcatcatgatgatccagaagtattagcagatacctgctgggctatttcctaccttactgatggtccaaatgaacgaattggcatggtggtgaaaacaggagttgtgccccaacttgtgaagcttctaggagcttctgaattgccaattgtgactcctgccctaagagccatagggaatattgtcactggtacagatgaacagactcaggttgtgattgatgcaggagcactcgccgtctttcccagcctgctcaccaaccccaaaactaacattcagaaggaagctacgtggacaatgtcaaacatcacagccggccgccaggaccagatacagcaagttgtgaatcatggattagtcccattccttgtcagtgttctctctaaggcagattttaagacacaaaaggaagctgtgtgggccgtgaccaactataccagtggtggaacagttgaacagattgtgtaccttgttcactgtggcataatagaaccgttgatgaacctcttaactgcaaaagataccaagattattctggttatcctggatgccatttcaaatatctttcaggctgctgagaaactaggtgaaactgagaaacttagtataatgattgaagaatgtggaggcttagacaaaattgaagctctacaaaaccatgaaaatgagtctgtgtataaggcttcgttaagcttaattgagaagtatttctctgtagaggaagaggaagatcaaaacgttgtaccagaaactacctctgaaggctacactttccaagttcaggatggggctcctgggacctttaacttttag

SEQ ID NO: 952 - DNA, 1074 bp, Homo Sapiens
atggcgccgcggagggtcaggtcgtttctgcgcgggctcccggcgctgctactgctgctgctcttcctcgggccctggcccgctgcgagccacggcggcaagtactcgcgggagaagaaccagcccaagccgtccccgaaacgcgagtccggagaggagttccgcatggagaagttgaaccagctgtgggagaaggcccagcgactgcatcttcctcccgtgaggctggccgagctccacgctgatctgaagatacaggagagggacgaactcgcctggaagaaactaaagcttgacggcttggacgaagatggggagaaggaagcgagactcatacgcaacctcaatgtcatcttggccaagtatggtctggacggaaagaaggacgctcggcaggtgaccagcaactccctcagtggcacccaggaagacgggctggatgaccccaggctggaaaagctgtggcacaaggcgaagacctctgggaaattctccggcgaagaactggacaagctctggcgggagttcctgcatcacaaagagaaagttcacgagtacaacgtcctgctggagaccctgagcaggaccgaagaaatccacgagaacgtcattagcccctcggacctgagcgacatcaagggcagcgtcctgcacagcaggcacacggagctgaaggagaagctgcgcagcatcaaccagggcctggaccgcctgcgcagggtcagccaccagggctacagcactgaggctgagttcgaggagcccagggtgattgacctgtgggacctggcgcagtccgccaacctcacggacaaggagctggaggcgttccgggaggagctcaagcacttcgaagccaaaatcgagaagcacaaccactaccagaagcagctggagattgcgcacgagaagctgaggcacgcagagagcgtgggcgacggcgagcgtgtgagccgcagccgcgagaagcacgccctgctggaggggcggaccaaggagctgggctacacggtgaagaagcatctgcaggacctgtccggcaggatctccagagctcggcacaacgaactctga

SEQ ID NO: 953 - DNA, 1032 bp, Homo Sapiens
atggaggtcctggcggcagagaccacgtcccagcaggagcggctgcaggccatcgcagagaagcggaagcggcaggcggagatcgagaacaagcgccggcagctggaggacgagcggaggcagctgcagcacctgaagtccaaggcactgcgggagcgctggctgctggaggggacgccgtcctcggcctcagagggggatgaggacctgaggaggcagatgcaggacgacgagcagaagacacggctgctggaggactcggtgtccaggttggagaaggaaattgaggtgctggagcgtggagactccgccccagccactgccaaggagaacgcggcggccccgagcccagtccgggccccagccccgagtccagccaaggaggagcgcaagacagaggtggtgatgaattcacagcagacgccggtgggcacgcccaaagacaagcgagtctccaacacgcccctgaggacggttgacggctcccccatgatgaaggcagtggtccatgctgtggacggcaccgccgagaacgggatccaccccctgagctcctccgaggtggacgaactcatccacaaagcggacgaggtcacgctgagcgaggcagggtccacggccggggcggcagagacccggggggctgtggagggggcagcccggaccacgccctcccggcgggagatcaccggtgtgcaggcacagccaggcgaggccacgtccggcccgccggggatccagcccggccaggagcccccggtcacaatgatcttcatgggttaccagaacgtggaggatgaggccgagaccaagaaggtgctgggccttcaagataccatcacggcggagctggtggtcatcgaagacgcggctgagcccaaggagcctgcaccacccaacggcagtgctgccgagcctcccacggaggccgcctccagggaagagaatcaggcggggcccgaggccaccaccagcgacccccaggacctcgacatgaagaagcaccgttgtaaatgctgctccatcatgtga

SEQ ID NO: 954 - DNA, 591 bp, Homo Sapiens
atggacgataccctgttccagttgaagttcacggcgaagcagctggagaagctggccaagaaggcggagaaggactccaaggcggagcaggccaaagtgaagaaggcccttctgcagaaaaatgtagagtgtgcccgtgtgtatgccgagaacgccatccgcaagaagaacgaaggtgtgaactggcttcggatggcgtcccgcgtagacgcagtggcctccaaggtgcagacagctgtgactatgaagggggtgaccaagaatatggcccaggtgaccaaagccctggacaaggccctgagcaccatggacctgcagaaggtctcctcagtgatggacaggttcgagcagcaggtgcagaacctggacgtccatacatcggtgatggaggactccatgagctcggccaccaccctgaccacgccgcaggagcaggtggacagcctcatcatgcagatcgccgaggagaatggcctggaggtgctggaccagctcagccagctgcccgagggcgcctctgccgtgggcgagagctctgtgcgcagccaggaggaccagctgtcacggaggttggccgccttgaggaactag

SEQ ID NO: 955 - DNA, 2217 bp, Homo Sapiens
atgcagccgaggtgggcccaaggggccacgatgtggcttggagtcctgctgacccttctgctctgttcaagccttgagggtcaagaaaactctttcacaatcaacagtgttgacatgaagagcctgccggactggacggtgcaaaatgggaagaacctgaccctgcagtgcttcgcggatgtcagcaccacctctcacgtcaagcctcagcaccagatgctgttctataaggatgacgtgctgttttacaacatctcctccatgaagagcacagagagttattttattcctgaagtccggatctatgactcagggacatataaatgtactgtgattgtgaacaacaaagagaaaaccactgcagagtaccaggtgttggtggaaggagtgcccagtcccagggtgacactggacaagaaagaggccatccaaggtgggatcgtgagggtcaactgttctgtcccagaggaaaaggccccaatacacttcacaattgaaaaacttgaactaaatgaaaaaatggtcaagctgaaaagagagaagaattctcgagaccagaattttgtgatactggaattccccgttgaggaacaggaccgcgttttatccttccgatgtcaagctaggatcatttctgggatccatatgcagacctcagaatctaccaagagtgaactggtcaccgtgacggaatccttctctacacccaagttccacatcagccccaccggaatgatcatggaaggagctcagctccacattaagtgcaccattcaagtgactcacctggcccaggagtttccagaaatcataattcagaaggacaaggcgattgtggcccacaacagacatggcaacaaggctgtgtactcagtcatggccatggtggagcacagtggcaactacacgtgcaaagtggagtccagccgcatatccaaggtcagcagcatcgtggtcaacataacagaactattttccaagcccgaactggaatcttccttcacacatctggaccaaggtgaaagactgaacctgtcctgctccatcccaggagcacctccagccaacttcaccatccagaaggaagatacgattgtgtcacagactcaagatttcaccaagatagcctcaaagtcggacagtgggacgtatatctgcactgcaggtattgacaaagtggtcaagaaaagcaacacagtccagatagtcgtatgtgaaatgctctcccagcccaggatttcttatgatgcccagtttgaggtcataaaaggacagaccatcgaagtccgttgcgaatcgatcagtggaactttgcctatttcttaccaacttttaaaaacaagtaaagttttggagaatagtaccaagaactcaaatgatcctgcggtattcaaagacaaccccactgaagacgtcgaataccagtgtgttgcagataattgccattcccatgccaaaatgttaagtgaggttctgagggtgaaggtgatagccccggtggatgaggtccagatttctatcctgtcaagtaaggtggtggagtctggagaggacattgtgctgcaatgtgctgtgaatgaaggatctggtcccatcacctataagttttacagagaaaaagagggcaaacccttctatcaaatgacctcaaatgccacccaggcattttggaccaagcagaaggctagcaaggaacaggagggagagtattactgcacagccttcaacagagccaaccacgcctccagtgtccccagaagcaaaatactgacagtcagagtcattcttgccccatggaagaaaggacttattgcagtggttatcatcggagtgatcattgctctcttgatcattgcggccaaatgttattttctgaggaaagccaaggccaagcagatgccagtggaaatgtccaggccagcagtaccacttctgaactccaacaacgagaaaatgtcagatcccaatatggaagctaacagtcattacggtcacaatgacgatgtcagaaaccatgcaatgaaaccaataaatgataataaagagcctctgaactcagacgtgcagtacacggaagttcaagtgtcctcagctgagtctcacaaagatctaggaaagaaggacacagagacagtgtacagtgaagtccggaaagctgtccctgatgccgtggaaagcagatactctagaacggaaggctcccttgatggaacttag

SEQ ID NO: 956 - DNA, 2829 bp, Homo Sapiens
atggccagcgacgccgtgcagagtgagcctcgcagctggtccctgctagagcagctgggcctggccggggcagacctggcggcccccggggtacagcagcagctggagctggagcgggagcggctgcggcgggaaatccgcaaggagctgaagctgaaggagggtgctgagaacctgcggcgggccaccactgacctgggccgcagcctgggccccgtagagctgctgctgcggggctcctcgcgccgcctcgacctgctgcaccagcagctgcaggagctgcacgcccacgtggtgcttcccgacccggcggccacccacgatggcccccagtcccctggtgcgggtggccccacctgctcggccaccaacctgagccgcgtggcgggcctggagaagcagttggccattgagctgaaggtgaagcagggggcggagaacatgatccagacctacagcaatggcagcaccaaggaccggaagctgctgctgacagcccagcagatgttgcaggacagtaagaccaagattgacatcatccgcatgcaactccgccgggcgctgcaggccggccagctggagaaccaggcagccccggatgacacccaagggagtcctgacctgggggctgtggagctgcgcatcgaagagctgcggcaccacttccgagtggagcacgcggtggccgagggtgccaagaacgtactgcgcctgctcagcgctgccaaggccccggaccgcaaggcagtcagcgaggcccaggagaaattgacagaatccaaccagaagctggggctgctgcgggaggctctggagcggagacttggggagctgcccgccgaccaccccaaggggcggctgctgcgagaagagctcgctgcggcctcctccgctgccttcagcacccgcctggccgggccctttcccgccacgcactacagcaccctgtgcaagcccgcgccgctcacagggaccctggaggtacgagtggtgggctgcagagacctcccagagaccatcccgtggaaccctaccccctcaatggggggacctgggaccccagacagccgcccccccttcctgagccgcccagcccggggcctttacagccgaagcggaagcctcagtggccggagcagcctcaaagcagaagccgagaacaccagtgaagtcagcactgtgcttaagctggataacacagtggtggggcagacgtcttggaagccatgtggccccaatgcctgggaccagagcttcactctggagctggaaagggcacgggaactggagttggctgtgttctggcgggaccagcggggcctgtgtgccctcaaattcctgaagttggaggatttcttggacaatgagaggcatgaggtgcagctggacatggaaccccagggctgcctggtggctgaggtcaccttccgcaaccctgtcattgagaggattcctcggctccgacggcagaagaaaattttctccaagcagcaagggaaggcgttccagcgtgctaggcagatgaacatcgatgtcgccacgtgggtgcggctgctccggaggctcatccccaatgccacgggcacaggcacctttagccctggggcttctccaggatccgaggcccggaccacgggtgacatatcggtggagaagctgaacctcggcactgactcggacagctcacctcagaagagctcgcgggatcctccttccagcccatcgagcctgagctcccccatccaggaatccactgctcccgagctgccttcggagacccaggagaccccaggccccgccctgtgcagccctctgaggaagtcacctctgaccctcgaagatttcaagttcctggcggtgctgggccggggtcattttgggaaggtgctcctctccgaattccggcccagtggggagctgttcgccatcaaggctctgaagaaaggggacattgtggcccgagacgaggtggagagcctgatgtgtgagaagcggatattggcggcagtgaccagtgcgggacaccccttcctggtgaacctcttcggctgtttccagacaccggagcacgtgtgcttcgtgatggagtactcggccggtggggacctgatgctgcacatccacagcgacgtgttctctgagccccgtgccatcttttattccgcctgcgtggtgctgggcctacagtttcttcacgaacacaagatcgtctacagggacctgaagttggacaatttgctcctggacaccgagggctacgtcaagatcgcagactttggcctctgcaaggaggggatgggctatggggaccggaccagcacattctgtgggaccccggagttcctggcccctgaggtgctgacggacacgtcgtacacgcgagctgtggactggtggggactgggtgtgctgctctacgagatgctggttggcgagtccccattcccaggggatgatgaggaggaggtcttcgacagcatcgtcaacgacgaggttcgctacccccgcttcctgtcggccgaagccatcggcatcatgagaaggctgcttcggaggaacccagagcggaggctgggatctagcgagagagatgcagaagatgtgaagaaacagcccttcttcaggactctgggctgggaagccctgttggcccggcgcctgccaccgccctttgtgcccacgctgtccggccgcaccgacgtcagcaacttcgacgaggagttcaccggggaggcccccacactgagcccgccccgcgacgcgcggcccctcacagccgcggagcaggcagccttcctggacttcgacttcgtggccgggggctgctag

SEQ ID NO: 957 - DNA, 2727 bp, Homo Sapiens
atggaggagggaggccgggacaaggcgccggtgcagccccagcagtctccagcggcggcccccggcggcacggacgagaagccgagcggcaaggagcggcgggatgccggggacaaggacaaagaacaggagctgtctgaagaggataaacagcttcaagatgaactggagatgctcgtggaacgactaggggagaaggatacatccctgtatcgaccagcgctggaggaattgcgaaggcagattcgttcttctacaacttccatgacttcagtgcccaagcctctcaaatttctgcgtccacactatggcaaactgaaggaaatctatgagaacatggcccctggggagaataagcgttttgctgctgacatcatctccgttttggccatgaccatgagtggggagcgtgagtgcctcaagtatcggctagtgggctcccaggaggaattggcatcatggggtcatgagtatgtcaggcatctggcaggagaagtggctaaggagtggcaggagctggatgacgcagagaaggtccagcgggagcctctgctcactctggtgaaggaaatcgtcccctataacatggcccacaatgcagagcatgaggcttgcgacctgcttatggaaattgagcaggtggacatgctggagaaggacattgatgaaaatgcatatgcaaaggtctgcctttatctcaccagttgtgtgaattacgtgcctgagcctgagaactcagccctactgcgttgtgccctgggtgtgttccgaaagtttagccgcttccctgaagctctgagattggcattgatgctcaatgacatggagttggtagaagacatcttcacctcctgcaaggatgtggtagtacagaaacagatggcattcatgctaggccggcatggggtgttcctggagctgagtgaagatgtcgaggagtatgaggacctgacagagatcatgtccaatgtacagctcaacagcaacttcttggccttagctcgggagctggacatcatggagcccaaggtgcctgatgacatctacaaaacccacctagagaacaacaggtttgggggcagtggctctcaggtggactctgcccgcatgaacctggcctcctcttttgtgaatggctttgtgaatgcagcttttggccaagacaagctgctaacagatgatggcaacaaatggctttacaagaacaaggaccacggaatgttgagtgcagctgcatctcttgggatgattctgctgtgggatgtggatggtggcctcacccagattgacaagtacctgtactcctctgaggactacattaagtcaggagctcttcttgcctgtggcatagtgaactctggggtccggaatgagtgtgaccctgctctggcactgctctcagactatgttctccacaacagcaacaccatgagacttggttccatctttgggctaggcttggcttatgctggctcaaatcgtgaagatgtcctaacactgctgctgcctgtgatgggagattcaaagtccagcatggaggtggcaggtgtcacagctttagcctgtggaatgatagcagtagggtcctgcaatggagatgtaacttccactatccttcagaccatcatggagaagtcagagactgagctcaaggatacttatgctcgttggcttcctcttggactgggtctcaaccacctggggaagggtgaggccatcgaggcaatcctggctgcactggaggttgtgtcagagccattccgcagttttgccaacacactggtggatgtgtgtgcatatgcaggctctgggaatgtgctgaaggtgcagcagctgctccacatttgtagcgaacactttgactccaaagagaaggaggaagacaaagacaagaaggaaaagaaagacaaggacaagaaggaagcccctgctgacatgggagcacatcagggagtggctgttctggggattgcccttattgctatgggggaggagattggtgcagagatggcattacgaacctttggccacttgctgagatatggggagcctacactccggagggctgtacctttagcactggccctcatctctgtttcaaatccacgactcaacatcctggataccctaagcaaattctctcatgatgctgatccagaagtttcctataactccatttttgccatgggcatggtgggcagtggtaccaataatgcccgtctggctgcaatgctgcgccagttagctcaatatcatgccaaggacccaaacaacctcttcatggtgcgcttggcacagggcctgacacatttagggaagggcacccttaccctctgcccctaccacagcgaccggcagcttatgagccaggtggccgtggctggactgctcactgtgcttgtctctttcctggatgttcgaaacattattctaggcaaatcacactatgtattgtatgggctggtggctgccatgcagccccgaatgctggttacgtttgatgaggagctgcggccattgccagtgtctgtccgtgtgggccaggcagtggatgtggtgggccaggctggcaagccgaagactatcacagggttccagacgcatacaaccccagtgttgttggcccacggggaacgggcagaattggccactgaggagtttcttcctgttacccccattctggaaggttttgttatccttcggaagaaccccaattatgatctctaa

SEQ ID NO: 958 - DNA, 750 bp, Homo Sapiens
atggccatgctcagggtccagcccgaggcccaagccaaggtggatgtgtttcgtgaagacctctgtaccaagacagagaacctgctcgggagctatttccccaagaagatttctgagctggatgcatttttaaaggagccagctctcaatgaagccaacttgagcaatctgaaggccccattggacatcccagtgcctgatccagtcaaggagaaagagaaagaggagcggaagaaacagcaggagaaggaagacaaggatgaaaagaagaagggggaggatgaagacaaaggtcctccctgtggcccagtgaactgcaatgaaaagatcgtggtccttctgcagcgcttgaagcctgagatcaaggatgtcattgagcagctcaacctggtcaccacctggttgcagctgcagatacctcggattgaggatggtaacaattttggagtggctgtccaggagaaggtgtttgagctgatgaccagcctccacaccaagctagaaggcttccacactcaaatctctaagtatttctctgagcgtggtgatgcagtgactaaagcagccaagcagccccatgtgggtgattatcggcagctggtgcacgagctggatgaggcagagtaccgggacatccggctgatggtcatggagatccgcaatgcttatgctgtgttatatgacatcatcctgaagaacttcgagaagctcaagaagcccaggggagaaacaaagggaatgatctattga

SEQ ID NO: 959 - DNA, 4506 bp, Homo Sapiens
atggcgcccacctggggccctggcatggtgtctgtggttggtcccatgggcctccttgtggtcctgctcgttggaggctgtgcagcagaagagccccccaggtttatcaaagaacccaaggaccagatcggcgtgtcggggggtgtggcctctttcgtgtgtcaggccacgggtgaccccaagccacgagtgacctggaacaagaagggcaagaaggtcaactctcagcgctttgagacgattgagtttgatgagagtgcaggggcagtgctgaggatccagccgctgaggacaccgcgggatgaaaacgtgtacgagtgtgtggcccagaactcggttggggagatcacagtccatgccaagcttactgtcctccgagaggaccagctgccctctggcttccccaacatcgacatgggcccacagttgaaggtggtggagcggacacggacagccaccatgctctgtgcagccagcggcaaccctgaccctgagatcacctggttcaaggacttcctgcctgtggatcctagtgccagcaatggacgcatcaaacagctgcgatcaggagccctgcagattgaaagcagtgaggaaaccgaccagggcaaatatgagtgtgtggccaccaacagcgccggcgtgcgctactcctcacctgccaacctctacgtgcgagtccgccgcgtggccccgcgcttctccatcctgcccatgagccacgagatcatgccagggggcaacgtgaacatcacctgcgtggccgtgggctcgcccatgccatacgtgaagtggatgcagggggccgaggacctgacccccgaggatgacatgcccgtgggtcggaacgtgctggaactcacagatgtcaaggactcggccaactacacctgcgtggccatgtccagcctgggcgtcattgaggcggttgctcagatcacggtgaaatctctccccaaagctcccgggactcccatggtgactgagaacacagccaccagcatcaccatcacgtgggactcgggcaacccagatcctgtgtcctattacgtcatcgaatataaatccaagagccaagacgggccgtatcagattaaagaggacatcaccaccacacgttacagcatcggcggcctgagccccaactcggagtacgagatctgggtgtcggccgtcaactccatcggccaggggccccccagcgagtccgtggtcacccgcacaggcgagcaggccccggccagcgcgccgcggaacgtgcaagcccggatgctcagcgcgaccaccatgattgtgcagtgggaggagccggtggagcccaacggcctgatccgcggctaccgcgtctactacaccatggaaccggagcaccccgtgggcaactggcagaagcacaacgtggacgacagcctgctgaccaccgtgggcagcctgctggaggacgagacctacaccgtgcgggtgctcgccttcacctccgtcggcgacgggcccctctcggaccccatccaggtcaagacgcagcagggagtgccgggccagcccatgaacctgcgggccgaggccaggtcggagaccagcatcacgctgtcctggagccccccgcggcaggagagtatcatcaagtacgagctcctcttccgggaaggcgaccatggccgggaggtgggaaggaccttcgacccgacgacttcctacgtggtggaggacctgaagcccaacacggagtacgccttccgcctggcggcccgctcgccgcagggcctgggcgccttcacccccgtggtgcggcagcgcacgctgcagtccatctcgcccaagaacttcaaggtgaaaatgatcatgaagacatcagttctgctcagctgggagttccctgacaactacaactcacccacaccctacaagatccagtacaatgggctcacactggatgtggatggccgtaccaccaagaagctcatcacgcacctcaagccccacaccttctacaactttgtgctgaccaatcgcggcagcagcctgggcggcctccagcagacggtcaccgcctggactgccttcaacctgctcaacggcaagcccagcgtcgcccccaagcctgatgctgacggcttcatcatggtgtatcttcctgacggccagagccccgtgcctgtccagagctatttcattgtgatggtgccactgcgcaagtctcgtggaggccaattcctgaccccgctgggtagcccagaggacatggatctggaagagctcatccaggacatctcacggctacagaggcgcagcctgcggcactcgcgtcagctggaggtgccccggccctatattgcagctcgcttctctgtgctgccacccacgttccatcccggcgaccagaagcagtatggcggcttcgataaccggggcctggagcccggccaccgctatgtcctcttcgtgcttgccgtgcttcagaagagcgagcctacctttgcagccagtcccttctcagaccccttccagctggataacccggacccccagcccatcgtggatggcgaggaggggcttatctgggtgatcgggcctgtgctggccgtggtcttcataatctgcattgtcattgctatcctgctctacaagaacaaacccgacagtaaacgcaaggactcagaaccccgcaccaaatgcctcctgaacaatgccgacctcgcccctcaccaccccaaggaccctgtggaaatgagacgcattaacttccagactccaggcatgcttagccacccgccaattcccatcgcagacatggcggagcacacggagcggctcaaggccaacgacagcctcaagctctcccaggagtatgagtccatcgaccctggacagcagttcacatgggaacattccaacctggaagtgaacaagccgaagaaccgctatgccaacgtcatcgcctatgaccactcccgtgtcatcctccagcccattgaaggcatcatgggcagtgattacatcaatgccaactacgtggacggctaccggtgtcagaacgcgtacattgccacgcaggggccgctgcctgagacctttggggacttctggcgtatggtgtgggagcagcggtcggcgaccatcgtcatgatgacgcggctggaggagaagtcacggatcaagtgtgatcagtattggcccaacagaggcacggagacctacggcttcatccaggtcacgttgctagataccatcgagctggccacattctgcgtcaggacattctctctgcacaagaatggctccagtgagaaacgcgaggtccgccagttccagtttacggcgtggccggaccatggcgtgcccgaatacccaacgcccttcctggctttcctgcggagagtcaagacctgcaacccgccagatgccggccccatcgtggttcactgcagtgccggtgtgggccgcacaggctgctttatcgtcatcgacgccatgcttgagcggatcaagccagagaagacagtcgatgtctatggccacgtgacgctcatgaggtcccagcgcaactacatggtgcagacggaggaccagtacagcttcatccacgaggccctgctggaggccgtgggctgtggcaacacagaagtgcccgcacgcagcctctatgcctacatccagaagctggcccaggtggagcctggcgaacacgtcactggcatggaactcgagttcaagcggctggctaactccaaggcccacacgtcacgcttcatcagtgccaatctgccttgtaacaagttcaagaaccgcctggtgaacatcatgccctatgagagcacacgggtctgtctgcaacccatccggggtgtggagggctctgactacatcaacgccagcttcattgatggctacaggcagcagaaggcctacatcgcgacacaggggccgctggcggagaccacggaagacttctggcgcatgctgtgggagaacaattcgacgatcgtggtgatgctgaccaagctgcgggagatgggccgggagaagtgtcaccagtactggccggccgagcgctctgcccgctaccagtactttgtggtagatccgatggcagaatacaacatgcctcagtatatcctgcgagagttcaaggtcacagatgcccgggatggccagtcccggactgtccggcagttccagttcacagactggccggaacagggtgtgccaaagtcgggggagggcttcatcgacttcattggccaagtgcataagactaaggagcagtttggccaggacggccccatctctgtccactgcagtgccggcgtgggcaggacgggcgtcttcatcacgcttagcatcgtgctggagcggatgcggtatgaaggcgtggtggacatctttcagacggtgaagatgctacgaacccagcggccggccatggtgcagacagaggatgagtaccagttctgttaccaggcggcactggagtacctcggaagctttgaccactatgcaacctaa

SEQ ID NO: 960 - DNA, 408 bp, Homo Sapiens
atgggccgcgttcgcaccaaaaccgtgaagaaggcggcccgggtcatcatagaaaagtactacacgcgcctgggcaacgacttccacacgaacaagcgcgtgtgcgaggagatcgccattatccccagcaaaaagctccgcaacaagatagcaggttatgtcacgcatctgatgaagcgaattcagagaggcccagtaagaggtatctccatcaagctgcaggaggaggagagagaaaggagagacaattatgttcctgaggtctcagccttggatcaggagattattgaagtagatcctgacactaaggaaatgctgaagcttttggacttcggcagtctgtccaaccttcaggtcactcagcctacagttgggatgaatttcaaaacgcctcggggacctgtttga

SEQ ID NO: 961 - DNA, 1995 bp, Homo Sapiens
atgtcgggggtccggggcctgtcgcggctgctgagcgctcggcgcctggcgctggccaaggcgtggccaacagtgttgcaaacaggaacccgaggttttcacttcactgttgatgggaacaagagggcatctgctaaagtttcagattccatttctgctcagtatccagtagtggatcatgaatttgatgcagtggtggtaggcgctggaggggcaggcttgcgagctgcatttggcctttctgaggcagggtttaatacagcatgtgttaccaagctgtttcctaccaggtcacacactgttgcagcacagggaggaatcaatgctgctctggggaacatggaggaggacaactggaggtggcatttctacgacaccgtgaagggctccgactggctgggggaccaggatgccatccactacatgacggagcaggcccccgccgccgtggtcgagctagaaaattatggcatgccgtttagcagaactgaagatgggaagatttatcagcgtgcatttggtggacagagcctcaagtttggaaagggcgggcaggcccatcggtgctgctgtgtggctgatcggactggccactcgctattgcacaccttatatggaaggtctctgcgatatgataccagctattttgtggagtattttgccttggatctcctgatggagaatggggagtgccgtggtgtcatcgcactgtgcatagaggacgggtccatccatcgcataagagcaaagaacactgttgttgccacaggaggctacgggcgcacctacttcagctgcacgtctgcccacaccagcactggcgacggcacggccatgatcaccagggcaggccttccttgccaggacctagagtttgttcagttccaccctacaggcatatatggtgctggttgtctcattacggaaggatgtcgtggagagggaggcattctcattaacagtcaaggcgaaaggtttatggagcgatacgcccctgtcgcgaaggacctggcgtctagagatgtggtgtctcggtccatgactctggagatccgagaaggaagaggctgtggccctgagaaagatcacgtctacctgcagctgcaccacctacctccagagcagctggccacgcgcctgcctggcatttcagagacagccatgatcttcgctggcgtggacgtcacgaaggagccgatccctgtcctccccaccgtgcattataacatgggcggcattcccaccaactacaaggggcaggtcctgaggcacgtgaatggccaggatcagattgtgcccggcctgtacgcctgtggggaggccgcctgtgcctcggtacatggtgccaaccgcctcggggcaaactcgctcttggacctggttgtctttggtcgggcatgtgccctgagcatcgaagagtcatgcaggcctggagataaagtccctccaattaaaccaaacgctggggaagaatctgtcatgaatcttgacaaattgagatttgctgatggaagcataagaacatcggaactgcgactcagcatgcagaagtcaatgcaaaatcatgctgccgtgttccgtgtgggaagcgtgttgcaagaaggttgtgggaaaatcagcaagctctatggagacctaaagcacctgaagacgttcgaccggggaatggtctggaacacggacctggtggagaccctggagctgcagaacctgatgctgtgtgcgctgcagaccatctacggagcagaggcacggaaggagtcacggggcgcgcatgccagggaagactacaaggtgcggattgatgagtacgattactccaagcccatccaggggcaacagaagaagccctttgaggagcactggaggaagcacaccctgtcctatgtggacgttggcactgggaaggtcactctggaatatagacccgtgatcgacaaaactttgaacgaggctgactgtgccaccgtcccgccagccattcgctcctactga

SEQ ID NO: 962 - DNA, 747 bp, Homo Sapiens
atgtcgggaggtggtgtgattcgtggccccgcagggaacaacgattgccgcatctacgtgggtaacttacctccagacatccgaaccaaggacattgaggacgtgttctacaaatacggcgctatccgcgacatcgacctcaagaatcgccgcgggggaccgcccttcgccttcgttgagttcgaggacccgcgagacgcggaagacgcggtgtatggtcgcgacggctatgattacgatgggtaccgtctgcgggtggagtttcctcgaagcggccgtggaacaggccgaggcggcggcgggggtggaggtggcggagctccccgaggtcgctatggccccccatccaggcggtctgaaaacagagtggttgtctctggactgcctccaagtggaagttggcaggatttaaaggatcacatgcgtgaagcaggtgatgtatgttatgctgatgtttaccgagatggcactggtgtcgtggagtttgtacggaaagaagatatgacctatgcagttcgaaaactggataacactaagtttagatctcatgagggagaaactgcctacatccgggttaaagttgatgggcccagaagtccaagttatggaagatctcgatctcgaagccgtagtcgtagcagaagccgtagcagaagcaacagcaggagtcgcagttactccccaaggagaagcagaggatcaccacgctattctccccgtcatagcagatctcgctctcgtacataa

SEQ ID NO: 963 - DNA, 200 bp, Homo Sapiens
tggccactgcgcagaccagacttcgctcgtactcgtgcgcctcgcttcgcttttcctccgcaaccatgtctgacaaacccgatatggctgagatcgagaaattcgataagtcgaaactgaagaagacagagacgcaagagaaaaatccactgccttccaaagaaacgattgaacaggagaagcaagcaggcgaatcgtaa

SEQ ID NO: 964 - DNA, 1623 bp, Homo Sapiens
atggactcggtggcttttgaggatgtagatgtgaacttcacccaggaggagtgggctttgctagatccttcccagaagaatctctacagagatgtgatgtgggaaaccatgaggaatctggcctctatagggaaaaaatggaaggaccagaacattaaagatcactacaaacaccgagggagaaatctaagaagtcatatgttagaaagactctatcaaactaaggatggtagtcagcgtggaggaatttttagccagtttgcaaatcagaatctgagcaagaaaatccctggagtgaaactctgtgaaagcattgtatatggagaagtcagcatgggtcagtcatcccttaatagacacatcaaagatcacagtggacatgaaccaaaggaatatcaggaatatggagagaagccagatacacgtaaccagtgttggaaacccttcagttctcaccactcctttcgaacacatgagataattcacactggagagaaactctatgattgtaaggaatgtggaaaaaccttcttttctctcaaaagaattagaagacacatcatcacacacagtggatatacaccatataaatgtaaggtgtgtgggaaagcttttgattatcccagtagatttcgaacacatgaaagaagtcacactggagagaaaccctatgaatgtcaggaatgtggaaaagccttcacttgtatcacaagtgttcgaagacacatgataaagcacactggagatggaccttataaatgtaaggtatgtgggaaaccctttcattctctgagttcatttcaagtgcatgaaagaattcacactggagaaaaaccctttaaatgtaagcaatgtggtaaagccttcagttgttccccaaccttacgaatacatgaaagaacccatactggagagaaaccttatgaatgcaagcagtgtgggaaggccttcagttatctcccctcccttcgactacatgaaagaattcacactggtgagaaacccttcgtatgtaaacaatgtggtaaagcctttagatctgccagtacctttcaaatacatgaaaggactcacactggagaaaaaccttatgaatgtaaggaatgtggggaagcattcagttgtatcccaagtatgcgaagacacatgataaaacatactggagaaggaccttataaatgtaaggtatgtgggaaaccctttcattctctgagtccatttcgaatacatgaaagaactcacactggagagaaaccttatgtatgtaaacattgtggtaaagctttcgtttcttcaacatcaattcgaatacatgaaagaactcatactggagagaaaccctatgagtgtaagcaatgtgggaaagccttcagttatctcaactcctttcgaacacatgaaatgattcacactggtgagaaaccctttgaatgtaagcgatgtggtaaagcctttagatcttctagttcctttcgactacatgaaaggactcacactggacagaaaccctatcattgcaaggaatgtgggaaagcctattcttgccgtgccagctttcagagacacatgttaacacatgctgaagatggaccaccttataaatgcatgtgggaaagcctttaa

SEQ ID NO: 965 - DNA, 978 bp, Homo Sapiens
atgaagccgatcctactgcagggccatgagcggtccattacgcagattaagtataaccgcgaaggagacctcctctttactgtggccaaggaccctatcgtcaatgtatggtactctgtgaatggtgagaggctgggcacctacatgggccataccggagctgtgtggtgtgtggacgctgactgggacaccaagcatgtcctcactggctcagctgacaacagctgtcgtctctgggactgtgaaacaggaaagcagctggcccttctcaagaccaattcggctgtccggacctgcggttttgactttgggggcaacatcatcatgttctccacggacaagcagatgggctaccagtgctttgtgagcttttttgacctgcgggatccgagccagattgacaacaatgagccctacatgaagatcccttgcaatgactctaaaatcaccagtgctgtttggggacccctgggggagtgcatcatcgctggccatgagagtggagagctcaaccagtatagtgccaagtctggagaggtgttggtgaatgttaaggagcactcccggcagatcaacgacatccagttatccagggacatgaccatgtttgtgaccgcgtccaaggacaacacagccaagctttttgactccacaactcttgaacatcagaagactttccggacagaacgtcctgtcaactcagctgccctctcccccaactatgaccatgtggtcctgggcggtggtcaggaagccatggatgtaaccacaacctccaccaggattggcaagtttgaggccaggttcttccatttggcctttgaagaagagtttggaagagtcaagggtcactttggacctatcaacagtgttgccttccatcctgatggcaagagctacagcagcggcggcgaagatggttacgtccgtatccattacttcgacccacagtacttcgaatttgagtttgaggcttaa

SEQ ID NO: 966 - DNA, 1614 bp, Homo Sapiens
atggcccactgcgtgaccttggttcagctgtccatttcctgtgaccatctcattgacaaggacatcggctccaagtctgacccactctgcgtccttttacaggatgtgggagggggcagctgggctgagcttggccggactgaacgggtgcggaactgctcaagccctgagttctccaagactctacagcttgagtaccgctttgagacagtccagaagctacgctttggaatctatgacatagacaacaagacgccagagctgagggatgatgacttcctagggggtgctgagtgttccctaggacagattgtgtccagccaggtactgactctccccttgatgctgaagcctggaaaacctgctgggcgggggaccatcacggtctcagctcaggaattaaaggacaatcgtgtagtaaccatggaggtagaggccagaaacctagataagaaggacttcctgggaaaatcagatccatttctggagttcttccgccagggtgatgggaaatggcacctggtgtacagatctgaggtcatcaagaacaacctgaaccctacatggaagcgtttctcagtccccgttcagcatttctgtggtgggaaccccagcacacccatccaggtgcaatgctccgattatgacagtgacgggtcacatgatctcatcggtaccttccacaccagcttggcccagctgcaggcagtcccggctgagtttgaatgcatccaccctgagaagcagcagaaaaagaaaagctacaagaactctggaactatccgtgtcaagatttgtcgggtagaaacagagtactcctttctggactatgtgatgggaggctgtcagatcaacttcactgtgggcgtggacttcactggctccaatggagacccctcctcacctgactccctacactacctgagtccaacaggggtcaatgagtacctgatggcactgtggagtgtgggcagcgtggttcaggactatgactcagacaagctgttccctgcatttggatttggggcccaggttccccctgactggcaggtctcgcatgaatttgccttgaatttcaaccccagtaacccctactgtgcaggcatccagggcattgtggatgcctaccgccaagccctgccccaagttcgcctctatggccctaccaactttgcacccatcatcaaccatgtggccaggtttgcagcccaggctgcacatcaggggactgcctcgcaatacttcatgctgttgctgctgactgatggtgctgtgacggatgtggaagccacacgtgaggctgtggtgcgtgcctcgaacctgcccatgtcagtgatcattgtgggtgtgggtggtgctgactttgaggccatggagcagctggacgctgatggtggacccctgcatacacgttctgggcaggctgctgcccgcgacattgtgcagtttgtaccctaccgccggttccagaatgcccctcgggaggcattggcacagaccgtgctcgcagaagtgcccacacaactggtctcatacttcagggcccagggttgggccccgctcaagccacttccaccctcagccaaggatcctgcacaggccccccaggcctag

SEQ ID NO: 967 - DNA, 6054 bp, Homo Sapiens
atgagcttggggctggcgagggcacaggaggtggagctgacactagagacggttatccagacactggagagcagcgtcctgtgccaggagaaaggcttgggcgcgcgggacctggcccaggacgctcagatcaccagcctgcctgcccttatcagggagattgtcacccgcaacctctcccagcctgagagcccagtcctgctgccggccacagagatggcatcgctgctgtcgctgcaggaggagaaccagctgctgcagcaggagctgtcccgcgtggaggacctgctggcccagagccgtgccgagcgcgatgagctcgccattaagtacaatgcggtcagcgagaggctggagcaggctctgcggctggagcctggggagctggagacgcaggagcccagggggctggtacggcagagcgtggagttgcggaggcagctgcaggaggagcaggcctcctaccggcgcaagctgcaggcctaccaggagggccagcagcggcaggcccagcttgtgcagcggctgcagggcaagattctccagtacaagaagaggtgctcggagctggagcagcagctgctggagagatccggagagctggagcagcagcggctgagggacacagagcacagccaagacctggaaagcgccctcatccggctggaggaggagcagcagaggagtgccagcctggcccaggtgaatgccatgctccgagaacagctggaccaggcaggctcggccaaccaggctctgagtgaggacatacgaaaggtgaccaatgactggacacgctgccgcaaggagctggagcaccgggaggcggcgtggaggcgcgaggaggagtccttcaacgcctacttcagcaacgagcacagtcgcctgctcctcctctggaggcaggtggtggggttccggcggctggtcagcgaggtgaagatgttcactgagagggacctgctgcagctgggaggggagctggcccggacatcacgagctgtccaggaggcgggcctgggactgagcacgggcctacggctggcagagagccgggccgaggcagccctggagaaacaggccctgctgcaggcccagctggaggagcagctgcgggacaaggtgctccgcgagaaggacctggcgcagcagcagatgcaaagcgacctggacaaggctgacctcagtgccagagtgacagagctgggcctggcagtgaagcgtcttgagaagcagaatctggagaaggatcaggtcaacaaggacctcactgagaagcttgaggccctggaatccctgcggctacaggagcaggcggccctggagacagaggatggagaggggctacagcagaccctaagggacctggcacaggccgtcttgtcagactctgagagcggcgtccagctgagcggctctgagcgcaccgcggatgcttccaacggcagcctgcgggggctctcgggccagcggaccccgtccccaccgcggcgctcctcgcccggccgaggccgttcaccccgccgaggcccctccccggcctgctcagactcctccacgctcgccctgatccactccgccctgcacaagcgccagctgcaggtccaggacatgcgtgggcgctatgaggcaagccaggacctactgggcaccctgcggaagcagcttagcgacagcgagagcgagcggcgggccctagaggaacagctgcagcgcctgcgggacaagaccgacggcgccatgcaggcccacgaggacgcccagcgcgaggtgcagcggctgcggagcgccaacgagctcctgagcagggagaagagcaacctggcccacagcctgcaggtggcccagcagcaggccgaggagctgcggcaggagcgggagaagctgcaggctgcccaggaggagctgcggcgccagcgggaccggctggaggaagagcaggaggacgcagtgcaggatggcgcgcgggtgcgccgggagcttgagcgcagccatagacaactagagcagctggaagggaagcgctcagtcctggccaaggagctggtggaggtgagggaggcgctgagccgcgccacactgcaacgggacatgctgcaggccgagaaggccgaggtggccgaggcgctgaccaaggctgaggctggccgcgtggagctcgagctctccatgaccaagctgagggcagaggaggcctccctgcaggactccctgtccaagctgagcgccctcaacgagagccttgctcaggacaagttggatctgaaccgccttgtcgcccagctggaggaagaaaagtccgccctgcagggccggcaacggcaggcagagcaggaggccacagtggcgcgggaagagcaggaacggctagaggagctgcggttggagcaggaggtggcgcggcagggcctggagggctccctacgagtggcggagcaggcccaggaggcattggagcagcagctccccacgctgcgccatgagcgcagccagctgcaggagcagctagcgcagctctcccggcagctgagcgggcgggagcaggagctggagcaggcccggcgggaggcccagcggcaagtggaggcgctggagcgagcggcccgtgagaaggaggcgctagccaaggagcacgctggcctggctgtgcagctggtggctgcggagcgtgaaggcaggaccctgtcagaggaggccacacgcctgcgcttggagaaggaagccctggagggcagcctgtttgaggtgcaacggcagctggcccagcttgaggcccgccgggagcagctggaagccgaggggcaggccctgctgctggccaaggagaccctgactggggagttggcgggcctgcggcagcaaataatagctacacaggagaaagccagtctagacaaggagctgatggcccagaagctggtgcaggctgagcgggaggcccaggcctctctgcgggagcagcgggcagctcacgaggaggacttacagcgactccagcgtgaaaaggaggcagcatggcgggagctggaggccgagcgggcccagctgcagagtcagctgcagcgtgagcaggaggagctgctggcccggctggaggctgagaaggaagagctgagtgaggagattgctgccctgcagcaggagcgcgacgagggcctcctcctagcagagagtgagaagcagcaggccttgtctctgaaggagtctgagaagacggcgctgtcagagaagttgatgggtacacggcacagcctggccaccatctccctggagatggagcggcagaaacgagatgcccagagccggcaggagcaggaccggagcaccgtgaacgctctgacgtctgagctgcgggacctacgggcccagcgggaggaggctgctgcggcccacgcccaggaggtgaggaggctgcaagagcaggcccgagacctgggcaagcagcgggactcctgtcttcgcgaggcagaagagcttcggacccagctgcgtctgctggaggatgcccgtgacgggctgcggcgggagctgctggaggcccagcgcaagctgcgtgagagccaggagggccgggaggtgcagcgccaggaggcaggcgagctgcgacgcagcctgggcgagggtgccaaggagcgcgaggccctgcggcgttccaatgaggagcttcggtctgctgtgaagaaggcagagagcgagcgcatcagcctgaagcttgccaatgaggacaaggagcagaagctggcactcctagaggaggcacggacagctgtgggcaaggaggccggggagctgcgaactgggctgcaggaggtggagcgctcacggctggaggctcggcgggagctgcaggagctccggcgtcagatgaagatgctggacagtgagaacaccagactgggccgggagctggcggagctgcagggccgcctggcgctgggcgagcgggcagagaaggagagcaggcgggagaccctgggcctccggcagaggctgctgaagggcgaggccagcctggaggtgatgcggcaggagctccaggtagcccagcggaagctgcaggaacaagaaggcgagttccggacccgcgagcgacgcctgctgggctccctggaggaggcgcgtggcactgaaaagcagcagctggaccacgcccgcggcctggagctgaagctggaggcggcgcgggccgaggctgcagagctgggcctgcggctgagcgcagccgagggccgggcacaaggcctggaggccgagctggcccgcgtggaggtgcagcggcgcgcggcggaggcccagctgggtggcctgcgctcggctctgcgccggggcctcggcctcggtcgcgcgcccagcccagccccgcggccagtgcccggttcccctgcccgggacgcacccgcagaaggaagcggggaagggctcaacagccccagcaccttagaatgcagccctgggtcccagccaccatctccaggacctgccacctccccagcctctccagacctggacccggaggcagtgcgcggggccctccgggaattcctgcaagagctgcggagtgcccagagagaacgggacgaacttcggacccagaccagtgccctgaatcgccagctggccgagatggaggctgagagggacagcgcaacctcgagggccaggcagctgcagaaggcggtggctgagagtgaggaagcccggcgcagtgtggatgggcggctgagcggggtccaggcggagctggcgctgcaggaggagagtgtgcggcgcagtgagcgggagcgccgggccacgctggaccaggtggccacactggagaggagcctgcaggccaccgagagcgagctccgggccagccaggagaagatcagcaagatgaaggccaatgagacaaagctggagggcgacaagcggcgcctgaaggaggttctggacgcctccgagagccgcactgtcaagctggagctgcagcggcgctcgcttgagggggagctgcagcgcagccgcctgggcctcagtgaccgcgaggcccaagcccaggccctccaggatcgggtggattccctgcagagacaggtggccgacagcgaggtgaaggcagggaccctgcagctgaccgtggagcggctgaatggggccctggctaaggtggaggaaagcgagggggccctgcgggacaaggtgcggggcctgacagaggccctggcccagagcagtgccagcctcaacagcacccgggacaagaacctgcatctgcagaaggctctgaccgcctgtgaacatgaccgccaagtactccaggaacggctggatgccgcccggcaggcattatctgaggcacggaagcagagcagctccctgggcgagcaggtgcagacgttgcgaggcgaggtggctgacctggaactgcagcgggtggaggccgagggccagctacaacagctacgggaggtgctgcggcagcggcaggagggtgaggctgcagccctgaacaccgtccagaagctgcaagacgagcggcggctgctgcaggagcgcctgggaagcctgcagcgcgccctggctcagctggaagctgagaagcgggaggtggagcgctcagccctgcggctggagaaggaccgtgtagccctcaggaggacgctggacaaggtggagcgggagaagcttcgtagccatgaggacacagtgcggctgagcgcagagaagggccgcctggaccgcaccctcacgggggctgagctggagctggcagaggcgcagaggcagatccagcagctggaggcgcaggtggtggtgctggagcagagccacagcccggcccagctggaggtggatgcgcagcagcagcagctggagctgcagcaggaggtggagcggctgcgcagcgcccaggcgcagactgagcgcaccctggaggctcgggagcgggcccaccgccagagggtgcgtgggctggaggagcaggtgtccacactgaagggccagctgcagcaggagcttcgaaggagctcagcacccttctccccaccctccggccccccagagaaatga

SEQ ID NO: 968 - DNA, 2412 bp, Homo Sapiens
atggccaagcgcagctcgctgtacatccgcatcgtggaggggaagaaccttcccgccaaggacatcactggcagcagcgacccctactgcatcgtgaaggtggacaatgagcccatcatcaggacagccacagtgtggaagaccctgtgccccttctggggtgaggagtaccaagtgcacctgccgcccaccttccacgctgtggctttctatgtcatggatgaggatgccctcagccgggacgacgttatcggaaaggtctgccttacaagggacaccatagcctctcaccctaagggtttcagcgggtgggcccacctgacggaggtcgaccccgatgaggaggtgcagggcgagatccacctgcggctggaagtgtggccaggggcccgggcctgccggctacgctgctctgtgctggaggccagggatctggccccaaaggaccgcaatggcacatctgaccccttcgtccgagtgcgctacaagggccggacacgggagacctcgatcgtgaagaagtcatgctacccacgctggaatgagacgtttgaatttgagctgcaggagggggccatggaggcgctgtgcgtggaggcctgggactgggaccttgtcagccgaaacgacttcctgggcaaagtggtgattgatgtccagagactgcgggtggtgcagcaggaggagggctggttccggctgcagcccgaccagtccaagagccggcggcatgacgagggcaacctgggctccttgcagctggaggtgcggctgcgggacgagacggtgctgccctccagctactaccagccactggtgcacctgctgtgccacgaggtcaagctgggcatgcagggcccagggcagctgatcccactcatcgaggagacaaccagcaccgagtgtcgccaggacgtggccacgaacctgctcaagctcttcctggggcaggggctggccaaggacttcctggacctgctcttccagctggagctgagtcgcaccagtgagaccaacaccctgttccggagcaactctctggcctcaaagtccatggagtcttttctgaaggtggccgggatgcagtacctgcacggcgtcctgggccccatcatcaacaaggtgtttgaggagaagaagtacgtggagctggaccccagcaaagtggaagttaaggatgtagggtgctccgggctgcaccgcccgcagaccgaggccgaggtgctggagcagagcgcgcagacgctgcgcgcccacctgggggccctgctgagcgcgctcagccgctcggttcgcgcgtgccccgccgtggtgcgcgccaccttccgccagctcttccggcgcgtgcgcgagcgcttccccggcgcccagcacgagaatgtaccgttcatcgccgtcaccagcttcctgtgcctgcgcttcttctctcccgccatcatgtcgcccaagctcttccacctgcgggagcgccacgcggacgcccgcaccagccgcaccctgctcctgttggccaaggcagtccagaacgtgggcaacatggacacgccggcttccagggccaaggaggcttggatggagccgctgcagcccaccgtgcgccagggcgtggcgcagctgaaggacttcatcaccaagctcgtggacatcgaggagaaggacgagctggacctgcagcggacgctgagtttgcaggcgccacctgtgaaggaggggccactcttcatccacaggaccaagggcaagggccccctcatgtcctcctccttcaagaagctctacttctccctcactaccgaggccctcagcttcgcgaagacgcccagctccaagaaaagcgccctcatcaagttagccaacatccgggcagcggaaaaggttgaggaaaagagctttggcggctcgcacgtcatgcaggtcatctacacggacgacgccggcaggccccagactgcctacctgcagtgcaagtgtgtgaatgagcttaaccagtggctgtctgcgctgcggaaggtgagcatcaacaacaccggactgctgggctcctaccaccctggcgtcttccgtggggacaagtggagctgctgccaccaaaaagagaagacaggtcagggctgcgataagacccggtcacgggtgaccctgcaggagtggaatgaccctcttgaccatgaccttgaggcccagctcatctaccggcacctgctgggcgtggaggccatgctgtgggagaggcaccgggagctgagcgggggcgcagaggcaggcacggtgcccacgagccctggcaaagtccccgaggactcattggcccggctgctccgggtgctgcaggacctccgcgaggcccatagctccagcccggccggctccccaccctcagagcccaactgcctcctggagctgcagacgtga

SEQ ID NO: 969 - DNA, 933 bp, Homo Sapiens
atggacagacttcttagacttggaggaggtatgcctggactgggccaggggccacctacagatgctcctgcagtggacacagcagaacaagtctatatctcttccctggcactgttaaaaatgttaaaacatggccgtgctggagttccaatggaagttatgggtttgatgcttggagaatttgttgatgattataccgtcagagtgattgatgtgtttgctatgccacagtcaggaacaggtgtcagtgtggaggcagttgatccagtgttccaagctaaaatgttggatatgttgaagcagacaggaaggccggagatggttgttggttggtatcacagtcaccctggctttggttgttggctttctggtgtggatatcaacactcagcagagctttgaagccttgtcggagagagctgtggcagtggttgtggatcccattcagagtgtaaaaggaaaggttgttattgatgccttcagattgatcaatgctaatatgatggtcttaggacatgaaccaagacaaacaacttcgaatctgggtcacttaaacaagccatctatccaggcattaattcatggactaaacagacattattactccattactattaactatcggaaaaatgaactggaacagaagatgttgctaaatttgcataagaagagttggatggaaggtttgacacttcaggactacagtgaacattgtaaacacaatgaatcagtggtaaaagagatgttggaattagccaagaattacaataaggctgtagaagaagaagataagatgacacctgaacagctggcaataaagaatgttggcaagcaggaccccaaacgtcatttggaggaacatgtggatgtacttatgacctcaaatattgtccagtgtttagcagctatgttggatactgtcgtatttaaataa

SEQ ID NO: 970 - DNA, 408 bp, Homo Sapiens
atgccaggtcgttggaggtggcagcgagacatgcacccggcccggaagctcctcagcctcctcttcctcatcctgatgggcactgaactcactcaagtgctgcccaccaaccctgaggagagctggcaggtgtacagctctgcccaggacagcgagggcaggtgtatctgcacagtggtcgctccacagcagaccatgtgttcacgggatgcccgcacaaaacagctgaggcagctactggagaaggtgcagaacatgtctcaatccatagaggtcttggacaggcggacccagagagacttgcagtacgtggagaagatggagaaccaaatgaaaggactggagtccaagttcaaacaggtggaggagagtcataagcaacacctggccaggcagtttaagggctaa

SEQ ID NO: 971 - DNA, 1008 bp, Homo Sapiens
atggcggcgggggcggctgaggcagctgtagcggccgtggaggaggtcggctcagccgggcagtttgaggagctgctgcgcctcaaagccaagtccctccttgtggtccatttctgggcaccatgggctccacagtgtgcacagatgaacgaagttatggcagagttagctaaagaactccctcaagtttcatttgtgaagttggaagctgaaggtgttcctgaagtatctgaaaaatatgaaattagctctgttcccacttttctgtttttcaagaattctcagaaaatcgaccgattagatggtgcacatgccccagagttgaccaaaaaagttcagcgacatgcatctagtggctccttcctacccagcgctaatgaacatcttaaagaagatctcaaccttcgcttgaagaaattgactcatgctgccccctgcatgctgtttatgaaaggaactcctcaagaaccacgctgtggtttcagcaagcagatggtggaaattcttcacaaacataatattcagtttagcagttttgatatcttctcagatgaagaggttcgacagggactcaaagcctattccagttggcctacctatcctcagctctatgtttctggagagctcataggaggacttgatataattaaggagctagaagcatctgaagaactagatacaatttgtcccaaagctcccaaattagaggaaaggctcaaagtgctgacaaataaagcttctgtgatgctctttatgaaaggaaacaaacaggaagcaaaatgtggattcagcaaacaaattctggaaatactaaatagtactggtgttgaatatgaaacattcgatatattggaggatgaagaagttcggcaaggattaaaagcttactcaaattggccaacataccctcagctgtatgtgaaaggggagctggtgggaggattggatattgtgaaggaactgaaagaaaatggtgaattgctgcctatactgagaggagaaaattaa

SEQ ID NO: 972 - DNA, 927 bp, Homo Sapiens
atggcgcctccggcccccggcccggcctccggcggctccggggaggtagacgagctgttcgacgtaaagaacgccttctacatcggcagctaccagcagtgcataaacgaggcgcagcgggtgaagctatcaagcccagagagagacgtggagagggacgtcttcctgtatagagcgtacctggcgcagaggaagttcggtgtggtcctggatgagatcaagccctcctcggcccctgagctccaggccgtgcgcatgtttgctgactacctcgcccacgagagtcggagggacagcatcgtggccgagctggaccgagagatgagcaggagcgtggacgtgaccaacaccaccttcctgctcatggccgcctccatctatctccacgaccagaacccggatgccgccctgcgtgcgctgcaccagggggacagcctggagtgcacagccatgacagtgcagatcctgctgaagctggaccgcctggacctcgcccggaaggagctgaagagaatgcaggacctggacgaggatgccaccctcacccagctcgccactgcctgggtcagcctggccacgggtggtgagaagctgcaggatgcctactacatcttccaggagatggctgacaagtgctcgcccaccctgctgctgctcaatgggcaggcggcctgccacatggcccagggccgctgggaggccgctgagggcctgctgcaggaggcgctagacaaggatagtggctacccagagacgctggtcaacctcatcgtcctgtcccagcacctgggcaagccccctgaggtgacaaaccgatacctgtcccagctgaaggatgcccacaggtcccatcccttcatcaaggagtaccaggccaaggagaacgactttgacaggctggtgctacagtacgctcccagcgcctga

SEQ ID NO: 973 - DNA, 858 bp, Homo Sapiens
atgtcctcccgacgggacacagactcggatacccaggatgccaatgactcaagctgtaagtcatctgagaggagcctcccggactgtacccctcaccccaactccatcagcatcgatgccggtccccggcaggcccccaagattgcccagatcaagcgcaacctctcctatggagacaacagcgaccctgccctagaggcgtcctcgctgcccccacccgacccctggctcgagacctcctccagctccccagcagagccggcacagccaggggcctgccgccgagacggctactggttcctaaagctactgcaggcagaaacagagcggctggaaggctggtgctgccagatggacaaggagaccaaagagaacaacctctctgaagaagtcttaggaaaagtcctcagtgctgtgggcagtgcccagctactgatgtcccagaaattccagcagttccggggcctctgtgagcaaaacttgaaccctgatgccaacccacgccccacagcccaggacctggcagggttctgggacctgctacagctgtccatcgaggatatcagcatgaagttcgatgaactctaccacctcaaggccaacagctggcagctggtggagacccccgagaagaggaaggaagagaagaaaccaccccctccggtcccaaagaagccagccaaatccaagccggcagtgagccgcgacaaggcctcagacgccagcgacaagcagcgccaggaggcccgcaagagactcctggcggccaagcgggcagcttctgtgcggcagaactcagccaccgagagcgcagacagcatcgagatttatgtcccggaggcccagaccaggctctga

SEQ ID NO: 974 - DNA, 1080 bp, Homo Sapiens
atgtcagacgaaggctcaagggggagccgcctgcccctggcgctgcccccggcctcccagggttgctcttcagggggcggcggcggcggctcctcggctgggggctcgggcaattcccggcccccacgcaacctccaaggcttgctgcagatggccatcaccgcgggctctgaagagccagaccctcctccagaaccgatgagtgaggagaggcgtcagtggctgcaggaggccatgtcggctgccttccgaggccagcgggaggaggtggagcagatgaagagctgcctccgagtgctgtcacagcccatgccccccactgctggggaggccgagcaggcggccgaccagcaagagcgagagggggccctggagctgctggccgacctgtgtgagaacatggacaatgccgcagacttctgccagctgtctggcatgcacctgctggtgggccggtacctggaggcgggggctgcgggactgcggtggcgggcggcacagctcatcggcacgtgcagtcagaacgtggcagccatccaggagcaggtgctgggcctgggtgccctgcgtaagctgctgcggctgctggaccgcgacgcctgcgacacggtgcgcgtcaaggccctcttcgccatctcctgtctggtccgagagcaggaggctgggctgctgcagttcctccgcctggacggcttctctgtgttgatgagggccatgcagcagcaggtgcagaagctcaaggtcaaatcagcattcctgctgcagaacctgctggtgggccaccctgaacacaaagggaccctgtgctccatggggatggtccagcagctggtggccctggtgcggacagagcacagccccttccacgagcacgtgcttggagccctgtgcagcctggtgacagactttccgcagggtgtgcgcgagtgtcgggagccggaactgggcctggaggagctcctccgccaccgctgtcagctgctgcagcagcatgaggagtaccaggaggagctggagttctgtgaaaagctgctacagacctgtttctccagcccagcggacgacagcatggatcggtga

SEQ ID NO: 975 - DNA, 582 bp, Homo Sapiens
atgttcaaaaacacgttccagagcggcttcctctccatcctctacagcatcggcagcaagcctctgcaaatctgggacaaaaaggtacggaatggccacatcaaaagaatcactgataatgacatccagtccctggtgctagagattgaagggacaaatgtaagcaccacatatatcacatgccctgcagaccccaagaagacgctgggaattaaacttcctttccttgtcatgattatcaaaaacctgaagaagtattttaccttcgaagtgcaggtactagatgacaagaatgtgcgtcgtcgctttcgggcaagtaactaccagagcaccacccgggtcaaacccttcatctgcaccatgcccatgcggctggatgacggctggaaccagattcagttcaacttgctagacttcacacggcgagcatacggcaccaattacatcgagaccctcagagtgcagatccatgcaaattgtcgcatccgacgggtttacttctcagacagactctactcagaagatgagctgccggcagagttcaaactgtatctcccagttcagaacaaggcaaagcaataa

SEQ ID NO: 976 - DNA, 330 bp, Homo Sapiens
atgaatccggccctaggcaaccagacggacgtggcgggcctgttcctggccaacagcagcgaggcgctggagcgagccgtgcgctgctgcacccaggcgtccgtggtgaccgacgacggcttcgcggagggaggcccggacgagcgtagcctgtacataatgcgcgtggtgcagatcgcggtcatgtgcgtgctctcactcaccgtggtcttcggcatcttcttcctcggctgcaatctgctcatcaagtccgagggcatgatcaacttcctcgtgaaggaccggaggccgtctaaggaggtggaggcggtggtcgtggggccctactga

SEQ ID NO: 977 - DNA, 2136 bp, Homo Sapiens
atgatggcggatgccaagtatgtcctctgccgatgggaaaagcgattatggcctgcgaaggttttggcccgaaccgcgacttcaacaaaaaataagagaagaaaggaatattttctagctgtgcaaatcctctctctagaggaaaaaattaaggtgaaaagcactgaagttgagatcctagagaagtctcaaattgaagccattgcttcctcgttagcctcacagaatgaggttcctgcggcacccctggaagaactggcctacagacggtcgcttcgcgtggctctggacgttctgagcgagggctcgatttggagtcaagaaagctctgcagggacaggtagagctgaccggtctctgcgagggaagcccatggagcatgtctcctcgccctgtgattcgaactcctcatctcttccccgcggagacgtgttgggcagttccagacctcacaggaggaggccatgtgtgcaacaaagcctgtcaagttcgttcacttgtgaaaaggaccccgagtgcaaagtggaccacaagaaggggctcaggaaaagtgaaaacccaagaggcccgttggtcctcccagctggaggtggtgcccaagatgagagtgggtccagaatccaccacaaaaattggactcttgcaagtaagaggggaggaaactcagcgcagaaggctagcttgtgcctgaatggatcttccctttcagaggacgacacggagagagacatggggagcaaaggaggcagctgggcagccccgtccttgccctccggggtcagggaggacgatccctgtgccaacgctgagggacacgaccccggtctgccgttgggcagcctcactgcgcccccagcccctgagccctcggcctgctcagagcctggagaatgccctgcgaaaaagaggccgcgcctggatggcagccaaaggccgcctgccgtgcagctggagcccatggcagcaggggccgcaccatcccccgggccggggccagggcccagagagtctgtgaccccgcgcagcaccgccaggctgggcccgcctccctcccacgcctctgcggatgcaaccagatgtcttccttgcccggattcccagaagctggagaaagagtgccagtcttccgaagagtccatggggtctaattccatgcgttctatcctggaggaagacgaggaagacgaggagccaccaagagtccttttataccacgaaccacgttcgtttgaagtaggaatgctagtctggcataaacataaaaaataccccttctggccagcagtggtcaaaagcgtcaggcagagagataagaaagcaagtgtgctatacatcgaaggacacatgaacccgaaaatgaaaggtttcacagtgtctcttaaaagtttaaagcactttgattgtaaagagaaacagacgcttctgaatcaagccagggaggacttcaaccaggacatcggctggtgtgtctccctcatcaccgactacagggtccggttaggctgcgggtcttttgctggctctttcctggaatattacgcggctgatataagctatcctgtccgaaaatccatccagcaggacgtcttggggaccaagcttcctcaactgagcaaggggagccccgaggagcccgtggtggggtgccccctggggcagaggcagccctgccggaaaatgctccccgaccgctcgcgggccgcccgggaccgggccaaccagaagctggtggagtacattgtgaaggccaagggcgcggagagccacctgcgggccatcctaaagagcaggaagccatctcgctggctgcagaccttcctgagctccagccagtacgtgacctgtgtggagacctacctggaggatgaggggcagctggacctggtggtgaagtacctgcagggcgtctaccaggaggtgggggccaaggtgctccagcgcaccaacggcgaccggatccggttcattctggacgtgcttctgcccgaggccatcatctgtgcgatctctgcggtggacgaggtggactacaagacggctgaggagaagtacatcaaggggccttcgctgagctaccgggaaaaagaaatatttgacaaccagctccttgaagagcggaaccggcgccgtcggtga

SEQ ID NO: 978 - DNA, 2892 bp, Homo Sapiens
atggcggcgcaccttaagaagcgggtttatgaggaattcacgaaagtggttcagccacaggaggaaattgctactaagaaactccgactaacaaaaccaagtaaatctgcagcactccacatagatctgtgtaaagctacctccccagcagatgctttgcaatacttgctccagtttgccaggaagcctgtcgaggcggaaagcgtagagggagtagtcaggattctcttggaacattattacaaggagaatgatccatctgtgagactgaaaattgcatcattgttgggtttattatcaaagacagcaggattttcaccagactgcattatggatgatgccatcaacatcctgcagaatgaaaagtctcatcaagtcctagctcaactgctggatactttgcttgcaattggcactaagctaccagagaatcaagctatccaaatgcgattagttgatgtggcctgcaagcatctgacagatacgtctcatggtgtaagaaataagtgcctgcagttacttggcaatcttggctctttggagaaaagtgtcacaaaagatgcagaaggcctagctgccagagatgtccagaagattataggggattacttcagtgaccaagacccacgtgtcagaacagcagctataaaagccatgttgcagctccatgaaagaggactgaaattacaccaaacaatttataatcaggcctgtaaattactctctgatgactatgaacaagtgcgcagtgctgcagtccagcttatctgggtcgtcagtcagctctatcctgaaagcattgtcccaattccttcttctaatgaagaaatacgcttagttgatgatgcgtttggcaaaatttgtcacatggtcagtgatggctcttgggtggttcgtgttcaggcagcaaaactgttgggctctatggagcaagtcagttctcatttcttggagcagacccttgacaagaagctgatgtcagatctgaggaggaaacgtactgcacatgagcgtgccaaggaactttacagttcgggggagttttccagtggcagaaagtggggagatgatgctcccaaggaagaagtagataccggggctgtgaacttgattgagtcaggagcttgtggagcttttgttcatgggttggaagatgagatgtatgaggttcgtattgctgctgtggaggccctctgcatgttggcccagtcttcaccctcttttgctgagaagtgccttgatttcctagttgacatgttcaacgatgaaattgaggaagtacgtctgcagtctatacataccatgagaaaaatctctaacaacatcaccctccgagaagatcagcttgacactgtcctggctgtgctagaggattcatccagagatattcgagaggctcttcatgaactcttatgctgtactaatgtttcaaccaaagaagggattcatcttgcattggtggagctgctgaaaaatttaaccaagtaccctactgatagggactccatatggaagtgcttgaagtttctgggaagtcggcatccaaccctggtgcttcccttggtgccagagcttctgagcacccacccattttttgacacagctgaaccagacatggatgatccagcttatattgcagttttggtacttattttcaatgctgctaaaacctgtccaacaatgccagcattgttctcagatcacaccttcaggcactatgcctacctccgagacagtctttctcatcttgttcctgccttgaggttaccaggtagaaaactggtgtcatcagctgtttctcccagcatcatacctcaagaggatccttcccagcagttcctgcagcagagccttgaaagagtgtatagtcttcagcacttggaccctcagggagcccaggagctgctggaattcaccatcagggatctgcaaagacttggagaacttcaatctgaattggcaggagtagctgatttctctgccacctatcttcgctgtcaactacttctcatcaaggccttgcaggaaaagttgtggaatgtagctgcccctttgtatttgaagcagagtgatttggcctcagcagcagcgaaacagattatggaagagacctacaaaatggaattcatgtacagtggtgtggagaataagcaggtggtgattatacatcacatgaggctgcaggccaaagctttgcaacttatagtaacagcacgaactacacgaggacttgaccccttatttgggatgtgtgaaaaatttttacaggaagtagacttttttcagaggtatttcatcgctgatttgccccacttgcaggacagctttgtggacaaactccttgaccttatgccccgactcatgacatccaaacctgcagaagtggtcaaaattctacagaccatgctgcgacagagtgcctttctgcatctcccgcttccagagcagatccacaaagcctcagccaccatcatcgagccagcgggcgagtcagacaaccctttgcggtttacctctgggttggtggttgccctggatgttgatgcaaccctggagcatgtgcaggatcctcagaacactgttaaggtccaggtcttatatccagatggccaggctcagatgattcaccccaagcctgcagacttccggaatcctggcccagggcggcaccggctcatcactcaggtttatctctcccacaccgcttggacagaggcatgccaggtggaagtgaggctgctgctggcctacaactccagtgctcgcattccaaaatgcccctggatggagggtggtgagatgtcaccacaggtggaaaccagcatcgagggcaccattcccttcagcaagcctgtaaaagtttatataatgcccaaacctgcacggcgctaa

SEQ ID NO: 979 - protein, 446 aa, Homo Sapiens
METQADLVSQEPQALLDSALPSKVPAFSDKDSLGDEMLAAALLKAKSQELVTFEDVAVYFIRKEWKRLEPAQRDLYRDVMLENYGNVFSLDRETRTENDQEISEDTRSHGVLLGRFQKDISQGLKFKEAYEREVSLKRPLGNSPGERLNRKMPDFGQVTVEEKLTPRGERSEKYNDFGNSFTVNSNLISHQRLPVGDRPHKCDECSKSFNRTSDLIQHQRIHTGEKPYECNECGKAFSQSSHLIQHQRIHTGEKPYECSDCGKTFSCSSALILHRRIHTGEKPYECNECGKTFSWSSTLTHHQRIHTGEKPYACNECGKAFSRSSTLIHHQRIHTGEKPYECNECGKAFSQSSHLYQHQRIHTGEKPYECMECGGKFTYSSGLIQHQRIHTGENPYECSECGKAFRYSSALVRHQRIHTGEKPLNGIGMSKSSLRVTTELNIREST

SEQ ID NO: 980 - protein, 623 aa, Homo Sapiens
MPSDLAKKKAAKKKEAAKARQRPRKGHEENGDVVTEPQVAEKNEANGRETTEVDLLTKELEDFEMKKAAARAVTGVLASHPNSTDVHIINLSLTFHGQELLSDTKLELNSGRRYGLIGLNGIGKSMLLSAIGKREVPIPEHIDIYHLTREMPPSDKTPLHCVMEVDTERAMLEKEAERLAHEDAECEKLMELYERLEELDADKAEMRASRILHGLGFTPAMQRKKLKDFSGGWRMRVALARALFIRPFMLLLDEPTNHLDLDACVWLEEELKTFKRILVLVSHSQDFLNGVCTNIIHMHNKKLKYYTGNYDQYVKTRLELEENQMKRFHWEQDQIAHMKNYIARFGHGSAKLARQAQSKEKTLQKMMASGLTERVVSDKTLSFYFPPCGKIPPPVIMVQNVSFKYTKDGPCIYNNLEFGIDLDTRVALVGPNGAGKSTLLKLLTGELLPTDGMIRKHSHVKIGRYHQHLQEQLDLDLSPLEYMMKCYPEIKEKEEMRKIIGRYGLTGKQQVSPIRNLSDGQKCRVCLAWLAWQNPHMLFLDEPTNHLDIETIDALADAINEFEGGMMLVSHDFRLIQQVAQEIWVCEKQTITKWPGDILAYKEHLKSKLVDEEPQLTKRTHNV

SEQ ID NO: 981 - protein, 781 aa, Homo Sapiens
MWGLVRLLLAWLGGWGCMGRLAAPARAWAGSREHPGPALLRTRRSWVWNQFFVIEEYAGPEPVLIGKLHSDVDRGEGRTKYLLTGEGAGTVFVIDEATGNIHVTKSLDREEKAQYVLLAQAVDRASNRPLEPPSEFIIKVQDINDNPPIFPLGPYHATVPEMSNVGTSVIQVTAHDADDPSYGNSAKLVYTVLDGLPFFSVDPQTGVVRTAIPNMDRETQEEFLVVIQAKDMGGHMGGLSGSTTVTVTLSDVNDNPPKFPQSLYQFSVVETAGPGTLVGRLRAQDPDLGDNALMAYSILDGEGSEAFSISTDLQGRDGLLTVRKPLDFESQRSYSFRVEATNTLIDPAYLRRGPFKDVASVRVAVQDAPEPPAFTQAAYHLTVPENKAPGTLVGQISAADLDSPASPIRYSILPHSDPERCFSIQPEEGTIHTAAPLDREARAWHNLTVLATELDSSAQASRVQVAIQTLDENDNAPQLAEPYDTFVCDSAAPGQLIQVIRALDRDEVGNSSHVSFQGPLGPDANFTVQDNRDGSASLLLPSRPAPPRHAPYLVPIELWDWGQPALSSTATVTVSVCRCQPDGSVASCWPEAHLSAAGLSTGALLAIITCVGALLALVVLFVALRRQKQEALMVLEEEDVRENIITYDDEGGGEEDTEAFDITALQNPDGAAPPAPGPPARRDVLPRARVSRQPRPPGPADVAQLLALRLREADEDPGVPPYDSVQVYGYEGRGSSCGSLSSLGSGSEAGGAPGPAEPLDDWGPLFRTLAELYGAKEPPAP

SEQ ID NO: 982 - protein, 465 aa, Homo Sapiens
MTPVRMQHSLAGQTYAVPFIQPDLRREEAVQQMADALQYLQKVSGDIFSRISQQVEQSRSQVQAIGEKVSLAQAKIEKIKGSKKAIKVFSSAKYPAPGRLQEYGSIFTGAQDPGLQRRPRHRIQSKHRPLDERALQEKLKDFPVCVSTKPEPEDDAEEGLGGLPSNISSVSSLLLFNTTENLYKKYVFLDPLAGAVTKTHVMLGAETEEKLFDAPLSISKREQLEQQVPENYFYVPDLGQVPEIHVPSYLPDLPGIANDLMYSADLGPGIAPSAPGTIPELPTFHTEVAEPLKVDLQDGVLTPPPPPPPPPPAPEVLASAPPLPPSTAAPVGQGARQDDSSSSASPSVQGAPREVVDPSGGWATLLESIRQAGGIGKAKLRSMKERKLEKQQQKEQEQVRATSQGGHLMSDLFNKLVMRRKGISGKGPGAGEGPGGAFVRVSDSIPPLPPPQQPQAEEDEDDWES

SEQ ID NO: 983 - protein, 146 aa, Homo Sapiens
MPLDPYHSVTWGHAQGSHHFVFGELRVRPILESLRDEPDPDPRPSREGPAGRVGALARGGPEPCDAASPPGGASCAPELARPREDKSAQQAKLEGGTRLCCRCPEESRLVPGGAVSPGDHVLEVSGTRGTCGCRPRRHAGPELAHS

SEQ ID NO: 984 - protein, 748 aa, Homo Sapiens
MSQSDDRDSKRDSLEEGELRDHRMEITIRNSPYRREDSMEDRGEEDDSLAIKPPQQMSRKEKVHHRKDEKRKEKRRHRSHSAEGGKHARVKEKEREHERRKRHREEQDKARREWERQKRREMAREHSRRERDRLEQLERKRERERKMREQQKEQREQKERERRAEERRKEREARREVSAHHRTMREDYSDKVKASHWSRSPPRPPRERFELGDGRKPVKEEKMEERDLLSDLQDISDSERKTSSAESSSAESGSGSEEEEEEEEEEEEEGSTSEESEEEEEEEEEEEEETGSNSEEASEQSAEEVSEEEMSEDEERENENHLLVVPESRFDRDSGESEEAEEEVGEGTPQSSALTEGDYVPDSPALSPIELKQELPKYLPALQGCRSVEEFQCLNRIEEGTYGVVYRAKDKKTDEIVALKRLKMEKEKEGFPITSLREINTILKAQHPNIVTVREIVVGSNMDKIYIVMNYVEHDLKSLMETMKQPFLPGEVKTLMIQLLRGVKHLHDNWILHRDLKTSNLLLSHAGILKVGDFGLAREYGSPLKAYTPVVVTLWYRAPELLLGAKEYSTAVDMWSVGCIFGELLTQKPLFPGKSEIDQINKVFKDLGTPSEKIWPGYSELPAVKKMTFSEHPYNNLRKRFGALLSDQGFDLMNKFLTYFPGRRISAEDGLKHEYFRETPLPIDPSMFPTWPAKSEQQRVKRGTSPRPPEGGLGYSQLGDDDLKETGFHLTTTNQGASAAGPGFSLKF

SEQ ID NO: 985 - protein, 326 aa, Homo Sapiens
MAPAAASPPEVIRAAQKDEYYRGGLRSAAGGALHSLAGARKWLEWRKEVELLSDVAYFGLTTLAGYQTLGEEYVSIIQVDPSRIHVPSSLRRGVLVTLHAVLPYLLDKALLPLEQELQADPDSGRPLQGSLGPGGRGCSGARRWMRHHTATLTEQQRRALLRAVFVLRQGLACLQRLHVAWFYIHGVFYHLAKRLTGITYLRVRSLPGEDLRARVSYRLLGVISLLHLVLSMGLQLYGFRQRQRARKEWRLHRGLSHRRASLEERAVSRNPLCTLCLEERRHPTATPCGHLFCWECITAWCSSKAECPLCREKFPPQKLIYLRHYR

SEQ ID NO: 986 - protein, 788 aa, Homo Sapiens
MDVSGQETDWRSTAFRQKLVSQIEDAMRKAGVAHSKSSKDMESHVFLKAKTRDEYLSLVARLIIHFRDIHNKKSQASVSDPMNALQSLTGGPAAGAAGIGMPPRGPGQSLGGMGSLGAMGQPMSLSGQPPPGTSGMAPHSMAVVSTATPQTQLQLQQVALQQQQQQQQFQQQQQAALQQQQQQQQQQQFQAQQSAMQQQFQAVVQQQQQLQQQQQQQQHLIKLHHQNQQQIQQQQQQLQRIAQLQLQQQQQQQQQQQQQQQQALQAQPPIQQPPMQQPQPPPSQALPQQLQQMHHTQHHQPPPQPQQPPVAQNQPSQLPPQSQTQPLVSQAQALPGQMLYTQPPLKFVRAPMVVQQPPVQPQVQQQQTAVQTAQAAQMVAPGVQMITEALAQGGMHIRARFPPTTAVSAIPSSSIPLGRQPMAQVSQSSLPMLSSPSPGQQVQTPQSMPPPPQPSPQPGQPSSQPNSNVSSGPAPSPSSFLPSPSPQPSQSPVTARTPQNFSVPSPGPLNTPVNPSSVMSPAGSSQAEEQQYLDKLKQLSKYIEPLRRMINKIDKNEDRKKDLSKMKSLLDILTDPSKRCPLKTLQKCEIALEKLKNDMAVPTPPPPPVPPTKQQYLCQPLLDAVLANIRSPVFNHSLYRTFVPAMTAIHGPPITAPVVCTRKRRLEDDERQSIPSVLQGEVARLDPKFLVNLDPSHCSNNGTVHLICKLDDKDLPSVPPLELSVPADYPAQSPLWIDRQWQYDANPFLQSVHRCMTSRLLQLPDKHSVTALLNTWAQSVHQACLSAA

SEQ ID NO: 987 - protein, 655 aa, Homo Sapiens
MVLYTTPFPNSCLSALHCVSWALIFPCYWLVDRLAASFIPTTYEKRQRADDPCCLQLLCTALFTPIYLALLVASLPFAFLGFLFWSPLQSARRPYIYSRLEDKGLAGGAALLSEWKGTGPGKSFCFATANVCLLPDSLARVNNLFNTQARAKEIGQRIRNGAARPQIKIYIDSPTNTSISAASFSSLVSPQGGDGVARAVPGSIKRTASVEYKGDGGRHPGDEAANGPASGDPVDSSSPEDACIVRIGGEEGGRPPEADDPVPGGQARNGAGGGPRGQTPNHNQQDGDSGSLGSPSASRESLVKGRAGPDTSASGEPGANSKLLYKASVVKKAAARRRRHPDEAFDHEVSAFFPANLDFLCLQEVFDKRAATKLKEQLHGYFEYILYDVGVYGCQGCCSFKCLNSGLLFASRYPIMDVAYHCYPNKCNDDALASKGALFLKVQVGSTPQDQRIVGYIACTHLHAPQEDSAIRCGQLDLLQDWLADFRKSTSSSSAANPEELVAFDVVCGDFNFDNCSSDDKLEQQHSLFTHYRDPCRLGPGEEKPWAIGTLLDTNGLYDEDVCTPDNLQKVLESEEGRREYLAFPTSKSSGQKGRKELLKGNGRRIDYMLHAEEGLCPDWKAEVEEFSFITQLSGLTDHLPVAMRLMVSSGEEEA

SEQ ID NO: 988 - protein, 472 aa, Homo Sapiens
RHKVLPQLLTAFEFGNAGAVVLTPLFKVGKFLSAEEYQQKIIPVVVKMFSSTDRAMRIRLLQQMEQFIQYLDEPTVNTQIFPHVVHGFLDTNPAIREQTVKSMLLLAPKLNEANLNVELMKHFARLQAKDEQGPIRCNTTVCLGKIGSYLSASTRHRVLTSAFSRATRDPFAPSRVAGVLGFAATHNLYSMNDCAQKILPVLCGLTVDPEKSVRDQAFKAIRSFLSKLESVSEDPTQLEEVEKDVHAASSPGMGGAAASWAGWAVTGVSSLTSKLIRSHPTTAPTETNIPQRPTPEGVPAPAPTPVPATPTTSGHWETQEEDKDTAEDSSTADRWDDEDWGSLEQEAESVLAQQDDWSTGGQVSRASQVSNSDHKSSKSPESDWSSWEAEGSWEQGWQEPSSQEPPPDGTRLASEYNWGGPESSDKGDPFATLSARPSTQDRSRLSWPGRSARSGGGRWRPNAPRGRWPRAP

SEQ ID NO: 989 - protein, 720 aa, Homo Sapiens
MPPPSDIVKVAIEWPGANAQLLEIDQKRPLASIIKEVCDGWSLPNPEYYTLRYADGPQLYITEQTRSDIKNGTILQLAISPSRAARQLMERTQSSNMETRLDAMKELAKLSADVTFATEFINMDGIIVLTRLVESGTKLLSHYSEMLAFTLTAFLELMDHGIVSWDMVSITFIKQIAGYVSQPMVDVSILQRSLAILESMVLNSQSLYQKIAEEITVGQLISHLQVSNQEIQTYAIALINALFLKAPEDKRQDMANAFAQKHLRSIILNHVIRGNRPIKTEMAHQLYVLQVLTFNLLEERMMTKMDPNDQAQRDIIFELRRIAFDAESDPSNAPGSGTEKRKAMYTKDYKMLGFTNHINPAMDFTQTPPGMLALDNMLYLAKVHQDTYIRIVLENSSREDKHECPFGRSAIELTKMLCEILQVGELPNEGRNDYHPMFFTHDRAFEELFGICIQLLNKTWKEMRATAEDFNKVMQVVREQITRALPSKPNSLDQFKSKLRSLSYSEILRLRQSERMSQDDFQSPPIVELREKIQPEILELIKQQRLNRLCEGSSFRKIGNRRRQERFWYCRLALNHKVLHYGDLDDNPQGEVTFESLQEKIPVADIKAIVTGKDCPHMKEKSALKQNKEVLELAFSILYDPDETLNFIAPNKYEYCIWIDGLSALLGKDMSSELTKSDLDTLLSMEMKLRLLDLENIQIPEAPPPIPKEPSSYDFVYHYG

SEQ ID NO: 990 - protein, 937 aa, Homo Sapiens
MLLYRGAPAGPGAPGCGLARPGGGPQAFGIRLSTMSPRYLQSNSSSHTRPFSAIAELLDNAVDPDVSARTVFIDVEEVKNKSCLTFTDDGCGMTPHKLHRMLSFGFTDKVIKKSQCPIGVFGNGFKSGSMRLGKDALVFTKNGGTLTVGLLSQTYLECVQAQAVIVPIVPFNQQNKKMIITEDSLPSLEAILNYSIFNRENDLLAQFDAIPGKKGTRVLIWNIRRNKNGKSELDFDTDQYDILVSDFDTEEKMTGGVTSELPETEYSLRAFCGILYMKPRMKIFLRQKKVTTQMIAKSLANVEYDTYKPTFTNKQVRITFGFSCKNSNQFGIMMYHNNRLIKSFEKVGCQVKPTRGEGVGVIGVIECNFLKPAYNKQDFEYTKEYRLTINALAQKLNAYWKEKTSQDNFETSTVARPIPKVPDQTWVQCDECLKWRKLPGKIDPSMLPARWFCYYNSHPKYRRCSVPEEQELTDEDLCLSKAKKQEQTVEEKKKMPMENENHQVFSNPPKILTVQEMAGLNNKTIGYEGIHSPSVLPSGGEESRSPSLQLKPLDSSVLQFSSKYKWILGEEPVEKRRRLQNEMTTPSLDYSMPAPYRRVEAPVAYPEGENSHDKSSSERSTPPYLFPEYPEASKNTGQNREVSILYPGAKDQRQGSLLPEELEDQMPRLVAEESNRGSTTINKEEVNKGPFVAVVGVAKGVRDSGAPIQLIPFNREELAERRKAVESWNPVPYSVASAAIPAAAIGEKARGYEESEGHNTPKLKNQRELEELKRTTEKLERVLAERNLFQQKVEELEQERNHWQSEFKKVQHELVIYSTQEAEGLYWSKKHMGYRQAEFQILKAELERTKEEKQELKEKLKETETHLEMLQKAQVSYRTPEGDDLERALAKLTRLRIHVSYLLTSVLPHLELREIGYDSEQVDGILYTVLEANHILD

SEQ ID NO: 991 - protein, 576 aa, Homo Sapiens
MIVFGWAVFLASRSLGQGLLLTLEEHIAHFLGTGGAATTMGNSCICRDDSGTDDSVDTQQQQAENSAVPTADTRSQPRDPVRPPRRGRGPHEPRRKKQNVDGLVLDTLAVIRTLVDNDQEPPYSMITLHEMAETDEGWLDVVQSLIRVIPLEDPLGPAVITLLLDECPLPTKDALQKLTEILNLNGEVACQDSSHPAKHRNTSAVLGCLAEKLAGPASIGLLSPGILEYLLQCLKLQSHPTVMLFALIALEKFAQTSENKLTISESSISDRLVTLESWANDPDYLKRQVGFCAQWSLDNLFLKEGRQLTYEKVNLSSIRAMLNSNDVSEYLKISPHGLEARCDASSFESVRCTFCVDAGVWYYEVTVVTSGVMQIGWATRDSKFLNHEGYGIGDDEYSCAYDGCRQLIWYNARSKPHIHPCWKEGDTVGFLLDLNEKQMIFFLNGNQLPPEKQVFSSTVSGFFAAASFMSYQQCEFNFGAKPFKYPPSMKFSTFNDYAFLTAEEKIILPRHRRLALLKQVSIRENCCSLCCDEVADTQLKPCGHSDLCMDCALQLETCPLCRKEIVSRIRQISHIS

SEQ ID NO: 992 - protein, 1023 aa, Homo Sapiens
MDANSKDKPPETKESAMNNAGNASFILGTGKIVTPQKHAELPPNPCTPDTFKSPLNFSTVTVEQLGITPESFVRNSAGKSSSYLKKCRRRSAVGARGSPETNHLIRFIARQQNIKNARKSPLAQDSPSQGSPALYRNVNTLRERISAFQSAFHSIKENEKMTGCLEFSEAGKESEMTDLTRKEGLSACQQSGFPAVLSSKRRRISYQRDSDENLTDAEGKVIGLQIFNIDTDRACAVETSVDLSEISSKLGSTQSGFLVEESLPLSELTETSNALKVADCVVGKGSSDAVSPDTFTAEVSSDAVPDVRSPATPACRRDLPTPKTFVLRSVLKKPSVKMCLESLQEHCNNLYDDDGTHPSLISNLPNCCKEKEAEDEENFEAPAFLNMRKRKRVTFGEDLSPEVFDESLPANTPLRKGGTPVCKKDFSGLSSLLLEQSPVPEPLPQPDFDDKGENLENIEPLQVSFAVLSSPNKSSISETLSGTDTFSSSNNHEKISSPKVGRITRTSNRRNQLVSVVEESVCNLLNTEVQPCKEKKINRRKSQETKCTKRALPKKSQVLKSCRKKKGKGKKSVQKSLYGERDIASKKPLLSPIPELPEVPEMTPSIPSIRRLGSGYFSSNGKLEEVKTPKNPVKRKDLLRHDPDLHMHQGYDKYDVSEFCSYIKSSSSLGNATSDEDPNTNIMNINENKNIPKAKNKSESENEPKAGTDSPVSCASVTEERVASDSPKPALTLQQGQEFSAGGQNAENLCQFFKISPDLNIKCERKDDFLGAAEGKLQCNRLMPNSQKDCHCLGDVLIENTKESKSQSEDLGRKPMESSSVVSCRDRKDRRRSMCYSDGRSLHLEKNGNHTPSSSVGSSVEISLENSELFKDLSDAIEQTFQRRNSETKVRRSTRLQKDLENEGLVWISLPLPSTSQKAKRRTICTFDSSGFESMSPIKETVSSRQKPQMAPPVSDPENSQGPAAGSSDEPGKRRKSFCISTLANTKATSQFKGYRRRSSLNGKGESSLTALERIEHNGERKQ

SEQ ID NO: 993 - protein, 130 aa, Homo Sapiens
MDAGSVRPSGADSPACAQDLSAFPSRRVLRAHRALCGPDPKACLFLGLLLPALRHTEHTPWGRSTAAYALHLQGYRVESPTIFFFSIFRKTLTSWRECKEGNACLYAVGELSPLQLSLQPALATSFPTLS

SEQ ID NO: 994 - protein, 120 aa, Homo Sapiens
MYSFPTTVVEERFSLSLQLIAFPTVSCEILLEITSQTNKKQTWETCYTHSAEEIGIIAGKRIHKTQAVPYICFLLRHQFISQSSHVRVEALYSLLFLGTLLQVGKGQEVLLKDALRARAP

SEQ ID NO: 995 - protein, 760 aa, Homo Sapiens
MLTFLPSPQELFTRSLAESELRSAPYEFPEESPIEQLEERRQRLERQISQDVKLEPDILLRAKQDFLKTDSDSDLQLYKEQGEGQGDRSLRERDVLEREFQRVTISGEEKCGVPFTDLLDAAKSVVRALFIREKYMALSLQSFCPTTRRYLQQLAEKPLETRTYEQGPDTPVSADAPVHPPALEQHPYEHCEPSTMPGDLGLGLRMVRGVVHVYTRREPDEHCSEVELPYPDLQEFVADVNVLMALIINGPIKSFCYRRLQYLSSKFQMHVLLNEMKELAAQKKVPHRDFYNIRKVDTHIHASSCMNQKHLLRFIKRAMKRHLEEIVHVEQGREQTLREVFESMNLTAYDLSVDTLDVHADRNTFHRFDKFNAKYNPIGESVLREIFIKTDNRVSGKYFAHIIKEVMSDLEESKYQNAELRLSIYGRSRDEWDKLARWAVMHRVHSPNVRWLVQVPRLFDVYRTKGQLANFQEMLENIFLPLFEATVHPASHPELHLFLEHVDGFDSVDDESKPENHVFNLESPLPEAWVEEDNPPYAYYLYYTFANMAMLNHLRRQRGFHTFVLRPHCGEAGPIHHLVSAFMLAENISHGLLLRKAPVLQYLYYLAQIGIAMSPLSNNSLFLSYHRNPLPEYLSRGLMVSLSTDDPLQFHFTKEPLMEEYSIATQVWKLSSCDMCELARNSVLMSGFSHKVKSHWLGPNYTKEGPEGNDIRRTNVPDIRVGYRYETLCQELALITQAVQSEMLETIPEEAGITMSPGPQ

SEQ ID NO: 996 - protein, 141 aa, Homo Sapiens
MTKQHELGGLLALVQNCQSEMNIKDSRAVGLSVKRLCISFVDEFCERTERPLYLAQGLFMKRETYWEVQDSGISPLLLLLSTALDCSPEAETRQSPGGRKMLQEPTLSMSLQILTGFLWVQLWNWETFLRIRTHSTDASCP

SEQ ID NO: 997 - protein, 620 aa, Homo Sapiens
MSRPGHGGLMPVNGLGFPPQNVARVVVWEWLNEHSRWRPYTATVCHHIENVLKEDARGSVVLGQVDAQLVPYIIDLQSMHQFRQDTGTMRPVRRNFYDPSSAPGKGIVWEWENDGGAWTAYDMDICITIQNAYEKQHPWLDLSSLGFCYLIYFNSMSQMNRQTRRRRRLRRRLDLAYPLTVGSIPKSQSWPVGASSGQPCSCQQCLLVNSTRAASNAILASQRRKAPPAPPLPPPPPPGGPPGALAVRPSATFTGAALWAAPAAGPAEPAPPPGAPPRSPGAPGGARTPGQNNLNRPGPQRTTSVSARASIPPGVPALPVKNLNGTGPVHPALAGMTGILLCAAGLPVCLTRAPKPILHPPPVSKSDVKPVPGVPGVCRKTKKKHLKKSKNPEDVVRRYMQKVKNPPDEDCTICMERLVTASGYEGVLRHKGVRPELVGRLGRCGHMYHLLCLVAMYSNGNKDGSLQCPTCKAIYGEKTGTQPPGKMEFHLIPHSLPGFPDTQTIRIVYDIPTGIQGPEHPNPGKKFTARGFPRHCYLPNNEKGRKVLRLLITAWERRLIFTIGTSNTTGESDTVVWNEIHHKTEFGSNLTGHGYPDASYLDNVLAELTAQGVSEAAAKA

SEQ ID NO: 998 - protein, 480 aa, Homo Sapiens
MQIPRAALLPLLLLLLAAPASAQLSRAGRSAPLAAGCPDRCEPARCPPQPEHCEGGRARDACGCCEVCGAPEGAACGLQEGPCGEGLQCVVPFGVPASATVRRRAQAGLCVCASSEPVCGSDANTYANLCQLRAASRRSERLHRPPVIVLQRGACGQGQEDPNSLRHKYNFIADVVEKIAPAVVHIELFRKLPFSKREVPVASGSGFIVSEDGLIVTNAHVVTNKHRVKVELKNGATYEAKIKDVDEKADIALIKIDHQGKLPVLLLGRSSELRPGEFVVAIGSPFSLQNTVTTGIVSTTQRGGKELGLRNSDMDYIQTDAIINYGNSGGPLVNLDGEVIGINTLKVTAGISFAIPSDKIKKFLTESHDRQAKGKAITKKKYIGIRMMSLTSSKAKELKDRHRDFPDVISGAYIIEVIPDTPAEAGGLKENDVIISINGQSVVSANDVSDVIKRESTLNMVVRRGNEDIMITVIPEEIDP

SEQ ID NO: 999 - protein, 501 aa, Homo Sapiens
MAAASVTPPGSLELLQPGFSKTLLGTKLEAKYLCSACRNVLRRPFQAQCGHRYCSFCLASILSSGPQNCAACVHEGIYEEGISILESSSAFPDNAARREVESLPAVCPSDGCTWKGTLKEYESCHEGRCPLMLTECPACKGLVRLGEKERHLEHECPERSLSCRHCRAPCCGADVKAHHEVCPKFPLTCDGCGKKKIPREKFQDHVKTCGKCRVPCRFHAIGCLETVEGEKQQEHEVQWLREHLAMLLSSVLEAKPLLGDQSHAGSELLQRCESLEKKTATFENIVCVLNREVERVAMTAEACSRQHRLDQDKIEALSSKVQQLERSIGLKDLAMADLEQKVLEMEASTYDGVFIWKISDFARKRQEAVAGRIPAIFSPAFYTSRYGYKMCLRIYLNGDGTGRGTHLSLFFVVMKGPNDALLRWPFNQKVTLMLLDQNNREHVIDAFRPDVTSSSFQRPVNDMNIASGCPLFCPVSKMEAKNSYVRDDAIFIKAIVDLTGL

SEQ ID NO: 1000 - protein, 265 aa, Homo Sapiens
MKVLLLKDAKEDDCGQDPYIRELGLYGLEATLIPVLSFEFLSLPSFSEKLSHPEDYGGLIFTSPRAVEAAELCLEQNNKTEVWERSLKEKWNAKSVYVVGNATASLVSKIGLDTEGETCGNAEKLAEYICSRESSALPLLFPCGNLKREILPKALKDKGIAMESITVYQTVAHPGIQGNLNSYYSQQGVPASITFFSPSGLTYSLKHIQELSGDNIDQIKFAAIGPTTARALAAQGLPVSCTAESPTPQALATGIRKALQPHGCC

SEQ ID NO: 1001 - protein, 778 aa, Homo Sapiens
MNKVDQKFQGSVSFKDVTVGFTQEEWQHLDPSQRALYRDVMLENYSNLVSVGYCAHKPEVIFRLEQGEEPWRLEEEFPSQSFPEVWTADHLKERSQENQSKHLWEVVFINNEMLTKEQGNVIGIPFNMDVSSFPSRKMFCQYDSRGMSFNTVSELVISKINYLGKKSDEFNACGKLLLNIKHDETHTREKNEVLKNRNTLSHRENTLQHEKIQTLDHNFEYSICQETLLEKAVFNTRKRENAEENNCDYNEFGRTFCDSSSLLFHQIPPSKDSHYEFSDCEKFLCVKSTLSKHDGVPVKHYDCGESGNNFRRKLCLSQLQKGDKGEKHFECNECGKAFWEKSHLTRHQRVHTGEKHFQCNQCGKTFWEKSNLTKHQRSHTGEKPFECNECGKAFSHKSALTLHQRTHTGEKPYQCNACGKTFYQKSDLTKHQRTHTGQKPYECYECGKSFCMNSHLTVHQRTHTGEKPFECLECGKSFCQKSHLTQHQRTHIGDKPYECNACGKTFYHKSVLTRHQIIHTGLKPYECYECGKTFCLKSDLTIHQRTHTGEKPFACPECGKFFSHKSTLSQHYRTHTGEKPYECHECGKIFYNKSYLTKHNRTHTGEKPYECNECGKTFCQKSQLTQHQRIHIGEKPYECNECGKAFCHKSALIVHQRTHTQEKPYKCNECGKSFCVKSGLILHERKHTGEKPYECNECGKSFSHKSSLTVHHRAHTGEKSCQCNECGKIFYRKSDLAKHQRSHTGEKPYECNTCRKTFSQKSNLIVHQRTHIGEKPYE

SEQ ID NO: 1002 - protein, 559 aa, Homo Sapiens
MAPTLQQAYRRRWWMACTAVLENLFFSAVLLGWGSLLIILKNEGFYSSTCPAESSTNTTQDEQRRWPGCDQQDEMLNLGFTIGSFVLSATTLPLGILMDRFGPRPVRLVGSACFTASCTLMALASRDVEALSPLIFLALSLNGFGGICLTFTSLTLPNMFGNLRSTLMALMIGSYASSAITFPGIKLIYDAGVAFVVIMFTWSGLACLIFLNCTLNWPIEAFPAPEEVNYTKKIKLSGLALDHKVTGDLFYTHVTTMGQRLSQKAPSLEDGSDAFMSPQDVRGTSENLPERSVPLRKSLCSPTFLWSLLTMGMTQLRIIFYMAAVNKMLEYLVTGGQEHETNEQQQKVAETVGFYSSVFGAMQLLCLLTCPLIGYIMDWRIKDCVDAPTQGTVLGDARDGVATKSIRPRYCKIQKLTNAISAFTLTNLLLVGFGITCLINNLHLQFVTFVLHTIVRGFFHSACGSLYAAVFPSNHFGTLTGLQSLISAVFALLQQPLFMAMVGPLKGEPFWVNLGLLLFSLLGFLLPSYLFYYRARLQQEYAANGMGPLKVLSGSEVTA

SEQ ID NO: 1003 - protein, 113 aa, Homo Sapiens
MADVEDGEETCALASHSGSSGSKSGGDKMFSLKKWNAVAMWSWDVECDTCAICRVQVMDACLRCQAENKQEDCVVVWGECNHSFHNCCMSLWVKQNNRCPLCQQDWVVQRIGK

SEQ ID NO: 1004 - protein, 381 aa, Homo Sapiens
MERGMHLGAAAAGEDDLFLHKSLSASTSKRLEAAFRSTPPGMDLSLAPPPRERPASSSSSPLGCFEPADPEGAGLLLPPPGGGGGGSAGSGGGGGGGVGVPGLLVGSAGVGGDPSLSSLPAGAALCLKYGESASRGSVAESSGGEQSPDDDSDGRCELVLRAGVADPRASPGAGGGGAKAAEGCSNAHLHGGASVPPGGLGGGGGGGSSSGSSGGGGGSGSGSGGSSSSSSSSSKKSKEQKALRLNINARERRRMHDLNDALDELRAVIPYAHSPSVRKLSKIATLLLAKNYILMQAQALEEMRRLVAYLNQGQAISAASLPSSAAAAAAAAALHPALGAYEQAAGYPFSAGLPPAASCPEKCALFNSVSSSLCKQCTEKP

SEQ ID NO: 1005 - protein, 465 aa, Homo Sapiens
MRRAAGMEDFSAEEEESWYDQQDLEQDLHLAAELGKTLLERNKELEGSLQQMYSTNEEQVQEIEYLTKQLDTLRHVNEQHAKVYEQLDLTARDLELTNHRLVLESKAAQQKIHGLTETIERLQAQVEELQAQVEQLRGLEQLRVLREKRERRRTIHTFPCLKELCTSPRCKDAFRLHSSSLELGPRPLEQENERLQTLVGALRSQVSQERQRKERAEREYTAVLQEYSELERQLCEMEACRLRVQELEAELLELQQMKQAKTYLLGPDDHLAEALLAPLTQAPEADDPQPGRGDDLGAQDGVSSPAASPGHVVRKSCSDTALNAIVAKDPASRHAGNLTLHANSVRKRGMSILREVDEQYHALLEKYEELLSKCRQHGAGVRHAGVQTSRPISRDSSWRDLRGGEEGQGEVKAGEKSLSQHVEAVDKRLEQSQPEYKALFKEIFSRIQKTKADINATKVKTHSSK

SEQ ID NO: 1006 - protein, 253 aa, Homo Sapiens
MAAAFRKAAKSRQREHRERSQPGFRKHLGLLEKKKDYKLRADDYRKKQEYLKALRKKALEKNPDEFYYKMTRVKLQDGVHIIKETKEEVTPEQLKLMRTQDVKYIEMKRVAEAKKIERLKSELHLLDFQGKQQNKHVFFFDTKKEVEQFDVATHLQTAPELVDRVFNRPRIETLQKEKVKGVTNQTGLKRIAKERQKQYNCLTQRIEREKKLFVIAQKIQTRKDLMDKTQKVKVKKETVNSPAIYKFQSRRKR

SEQ ID NO: 1007 - protein, 284 aa, Homo Sapiens
MKTSAELHEQEKPPSSPRATGPGRLGHARGRGPDALRGGAAGPGRASSGAPRERKMAPHDPGSLTTLVPWAAALLLALGVERALALPEICTQCPGSVQNLSKVAFYCKTTRELMLHARCCLNQKGTILGLDLQNCSLEDPGPNFHQAHTTVIIDLQANPLKGDLANTFRGFTQLQTLILPQHVNCPGGINAWNTITSYIDNQICQGQKNLCNNTGDPEMCPENGSCVPDGPGLLQCVCADGFHGYKCMRQGSFSLLMFFGILGATTLSVSILLWATQRRKAKTS

SEQ ID NO: 1008 - protein, 361 aa, Homo Sapiens
MAQPGDPRRLCRLVQEGRLRALKEELQAAGGCPGPAGDTLLHCAARHGHRDVLAYLAEAWGMDIEATNRDYKRPLHEAASMGHRDCVRYLLGRGAAVDCLKKADWTPLMMACTRKNLGVIQELVEHGANPLLKNKDGWNSFHIASREGDPLILQYLLTVCPGAWKTESKIRRTPLHTAAMHGHLEAVKVLLKRCQYEPDYRDNCGVTALMDAIQCGHIDVARLLLDEHGACLSAEDSLGAQALHRAAVTGQDEAIRFLVSELGVDVDVRATSTHLTALHYAAKEGHTSTIQTLLSLGADINSKDEKNRSALHLACAGQHLACAKFLLQSGLKDSEDITGTLAQQLPRRADVLQGSGHSAMT

SEQ ID NO: 1009 - protein, 354 aa, Homo Sapiens
MCGRTSCHLPRDVLTRACAYQDRRGQQRLPEWRDPDKYCPSYNKSPQSNSPVLLSRLHFEKDADSSERIIAPMRWGLVPSWFKESDPSKLQFNTTNCRSDTVMEKRSFKVPLGKGRRCVVLADGFYEWQRCQGTNQRQPYFIYFPQIKTEKSGSIGAADSPENWEKVWDNWRLLTMAGIFDCWEPPEGGDVLYSYTIITVDSCKGLSDIHHRMPAILDGEEAVSKWLDFGEVSTQEALKLIHPTENITFHAVSSVVNNSRNNTPECLAPVDLVVKKELRASGSSQRMLQWLATKSPKKEDSKTPQKEESDVPQWSSQFLQKSPLPTKRGTAGLLEQWLKREKEEEPVAKRPYSQ

SEQ ID NO: 1010 - protein, 360 aa, Homo Sapiens
MSQGRGKYDFYIGLGLAMSSSIFIGGSFILKKKGLLRLARKGSMRAGQGGHAYLKEWLWWAGLLSMGAGEVANFAAYAFAPATLVTPLGALSVLVSAILSSYFLNERLNLHGKIGCLLSILGSTVMVIHAPKEEEIETLNEMSHKLGDPGFVVFATLVVIVALILIFVVGPRHGQTNILVYITICSVIGAFSVSCVKGLGIAIKELFAGKPVLRHPLAWILLLSLIVCVSTQINYLNRALDIFNTSIVTPIYYVFFTTSVLTCSAILFKEWQDMPVDDVIGTLSGFFTIIVGIFLLHAFKDVSFSLASLPVSFRKDEKAMNGNLSNMYEVLNNNEESLTCGIEQHTGENVSRRNGNLTAF

SEQ ID NO: 1011 - protein, 755 aa, Homo Sapiens
MTESASSTSGQEFDVFSVMDWKDGVGTLPGSDLKFRVNEFGALEVITDENEMENVKKATATTTWMVPTAQEVFSEKTGMPFRLKDPVKVEGLQFCENCCQYGNVDECLSGGNYCSQNCARHIKDKDQKEERDVEEDNEEEDPKCSRKKKPKLSLKADTKEDGEERDDEMENKQDVRILRGSQRARRKRRGDSAVLKQGLPPKGKKAWCWASYLEEEKAVAVPAKLFKEHQSFPYNKNGFKVGMKLEGVDPEHQSVYCVLTVAEVCGYRIKLHFDGYSDCYDFWVNADALDIHPVGWCEKTGHKLHPPKGYKEEEFNWQTYLKTCKAQAAPKSLFENQNITVIPSGFRVGMKLEAVDKKNPSFICVATVTDMVDNRFLVHFDNWDESYDYWCEASSPHIHPVGWCKEHRRTLITPPGYPNVKHFSWDKYLEETNSLPAPARAFKVKPPHGFQKKMKLEVVDKRNPMFIRVATVADTDDHRVKVHFDGWNNCYDYWIDADSPDIHPVGWCSKTGHPLQPPLSPLELMEASEHGGCSTPGCKGIGHFKRARHLGPHSAANCPYSEINLNKDRIFPDRLSGEMPPASPSFPRNKRTDANESSSSPEIRDQHADDVKEDFEERTESEMRTSHEARGAREEPTVQQAQRRSAVFLSFKSPIPCLPLRWEQQSKLLPTVAGIPASKVSKWSTDEVSEFIQSLPGCEEHGKVFKDEQIDGEAFLLMTQTDIVKIMSIKLGPALKIFNSILMFKAAEKNSHNEL

SEQ ID NO: 1012 - protein, 204 aa, Homo Sapiens
MELKQSLSTHLEAEKPLRRYGAVEETAWKTERLGRNQLDIISMAETTMMPEEIELEMAKIQRLREVLVRRESELRFMMDDIQLCKDIMDLKQELQNLVAIPEKEKTKLQKQREDELIQKIHKLVQKRDFLVDDAEVERLREQEEDKEMADFLRIKLKPLDKVTKSPASSRAEKKAEPPPSKPTVAKTGLALIKDCCGATQCNIM

SEQ ID NO: 1013 - protein, 517 aa, Homo Sapiens
MVDKTPVMCSHFAQDVWPEHSIKDSFQKVILRTYGKYGHENLQLRKDHKSVDACKVYKGGYNGLNQCLTTTDSKIFQCDKYVKVFHKFPNVNRNKIRHTGKKPFKCKNRGKSFCMLSQLTQHKKIHTREYSYKCEECGKAFNWSSTLTKHKIIHTGEKPYKCEECGKAFNRSSNLTKHKIIHTGEKPYKCEECGKAFNRSSTLTKHKRIHTEEKPYKCEECGKAFNQFSILNKHKRIHMEDKPYKCEECGKAFRVFSILKKHKIIHTGEKPYKCEECGKAFNQFSNLTKHKIIHTGEKPYKCDECGKAFNQSSTLTKHKRIHTGEKPYKCEECGKAFKQSSTLTEHKIIHTGEKPYKCEKCGKAFSWSSAFTKHKRNHMEDKPYKCEECGKAFSVFSTLTKHKIIHTREKPYKCEECGKAFNQSSIFTKHKIIHTEGKSYKCEKCGNAFNQSSNLTARKIIYTGEKPYKYEECDKAFNKFSTLITHQIIYTGEKPCKHECGRAFNKSSNYTKEKLQT

SEQ ID NO: 1014 - protein, 1723 aa, Homo Sapiens
MEKRSSGRRSGRRRGSQKSTDSPGADAELPESAARDDAVFDDEVAPNAASDNASAEKKVKSPRAALDGGVASAASPESKPSPGTKGQLRGESDRSKQPPPASSPTKRKGRSRALEAVPAPPASGPRAPAKESPPKRVPDPSPVTKGTAAESGEEAARAIPRELPVKSSSLLPEIKPEHKRGPLPNHFNGRAEGGRSRELGRAAGAPGASDADGLKPRNHFGVGRSTVTTKVTLPAKPKHVELNLKTPKNLDSLGNEHNPFSQPVHKGNTATKISLFENKRTNSSPRHTDIRGQRNTPASSKTFVGRAKLNLAKKAKEMEQPEKKVMPNSPQNGVLVKETAIETKVTVSEEEILPATRGMNGDSSENQALGPQPNQDDKADVQTDAGCLSEPVASALIPVKDHKLLEKEDSEAADSKSLVLENVTDTAQDIPTTVDTKDLPPTAMPKPQHTFSDSQSPAESSPGPSLSLSAPAPGDVPKDTCVQSPISSFPCTDLKVSENHKGCVLPVSRQNNEKMPLLELGGETTPPLSTERSPEAVGSECPSRVLVQVRSFVLPVESTQDVSSQVIPESSEVREVQLPTCHSNEPEVVSVASCAPPQEEVLGNEHSHCTAELAAKSGPQVIPPASEKTLPIQAQSQGSRTPLMAESSPTNSPSSGNHLATPQRPDQTVTNGQDSPASLLNISAGSDDSVFDSSSDMEKFTEIIKQMDSAVCMPMKRKKARMPNSPAPHFAMPPIHEDHLEKVFDPKVFTFGLGKKKESQPEMSPALHLMQNLDTKSKLRPKRASAEQSVLFKSLHTNTNGNSEPLVMPEINDKENRDVTNGGIKRSRLEKSALFSSLLSSLPQDKIFSPSVTSVNTMTTAFSTSQNGSLSQSSVSQPTTEGAPPCGLNKEQSNLLPDNSLKVFNFNSSSTSHSSLKSPSHMEKYPQKEKTKEDLDSRSNLHLPETKFSELSKLKNDDMEKANHIESVIKSNLPNCANSDTDFMGLFKSSRYDPSISFSGMSLSDTMTLRGSVQNKLNPRPGKVVIYSEPDVSEKCIEVFSDIQDCSSWSLSPVILIKVVRGCWILYEQPNFEGHSIPLEEGELELSGLWGIEDILERHEEAESDKPVVIGSIRHVVQDYRVSHIDLFTEPEGLGILSSYFDDTEEMQGFGVMQKTCSMKVHWGTWLIYEEPGFQGVPFILEPGEYPDLSFWDTEAAYIGSMRPLKMGGRKVEFPTDPKVVVYEKPFFEGKCVELETGMCSFVMEGGETEEATGDDHLPFTSVGSMKVLRGIWVAYEKPGFTGHQYLLEEGEYRDWKAWGGYNGELQSLRPILGDFSNAHMIMYSEKNFGSKGSSIDVLGIVANLKETGYGVKTQSINVLSGVWVAYENPDFTGEQYILDKGFYTSFEDWGGKNCKISSVQPICLDSFTGPRRRNQIHLFSEPQFQGHSQSFEETTSQIDDSFSTKSCRVSGGSWVVYDGENFTGNQYVLEEGHYPCLSAMGCPPGATFKSLRFIDVEFSEPTIILFEREDFKGKKIELNAETVNLRSLGFNTQIRSVQVIGGIWVTYEYGSYRGRQFLLSPAEVPNWYEFSGCRQIGSLRPFVQKRIYFRLRNKATGLFMSTNGNLEDLKLLRIQVMEDVGADDQIWIYQEGCIKCRIAEDCCLTIVGSLVTSGSKLGLALDQNADSQFWSLKSDGRIYSKLKPNLVLDIKGGTQYDQNHIILNTVSKEKFTQVWEAMVLYT

SEQ ID NO: 1015 - protein, 327 aa, Homo Sapiens
MPALLERPKLSNAMARALHRHIMMERERKRQEEEEVDKMMEQKMKEEQERRKKKEMEERMSLEETKEQILKLEEKLLALQEEKHQLFLQLKKVLHEEEKRRRKEQSDLTTLTSAAYQQSLTVHTGTHLLSMQGSPGGHNRPGTLMAADRAKQMFGPQVLTTRHYVGSAAAFAGTPEHGQFQGSPGGAYGTAQPPPHYGPTQPAYSPSQQLRAPSAFPAVQYLSQPQPQPYAVHGHFQPTQTGFLQPGGALSLQKQMEHANQQTGFSDSSSLRPMHPQALHPAPGLLASPQLPVQMQPAGKSGFAATSQPGPRLPFIQHSQNPRFYHK

SEQ ID NO: 1016 - protein, 206 aa, Homo Sapiens
MAEDADMRNELEEMQRRADQLADESLESTRRMLQLVEESKDAGIRTLVMLDEQGEQLDRVEEGMNHINQDMKEAEKNLKDLGKCCGLFICPCNKLKSSDAYKKAWGNNQDGVVASQPARVVDEREQMAISGGFIRRVTNDARENEMDENLEQVSGIIGNLRHMALDMGNEIDTQNRQIDRIMEKADSNKTRIDEANQRATKMLGSG

SEQ ID NO: 1017 - protein, 242 aa, Homo Sapiens
MPGPWLLLALALTLNLTGVPGGRAQPEAAQQEAVTAAEHPGLDDFLRQVERLLFLRENIQRLQGDQGEHSASQIFQSDWLSKRQHPGKREEEEEEGVEEEEEEEGGAVGPHKRQHPGRREDEASWSVDVTQHKRQHPGRRSPWLAYAVPKRQHPGRRLADPKAQRSWEEEEEEEEREEDLMPEKRQHPGKRALGGPCGPQGAYGQAGLLLGLLDDLSRSQGAEEKRQHPGRRAAWVREPLEE

SEQ ID NO: 1018 - protein, 332 aa, Homo Sapiens
MDSTSSLHGSSLHRPSTEQTRTDFSWDGINLSMEDTTSILPKLKRNSNAYGIGALAKSSFSGISRSMKDHVTKPTAMGQGRVAHMIEWQGWGKTPAVQPQHSHESVRRDTDAYSDLSDGEKEARFLAGVMEQFAISEATLMAWSSMDGEDMSVNSTQEPLGCNYSDNYQELMDSQDALAQAPMDGWPHSYVSQGMYCLGSSDAWEASDQSLIASPATGSYLGPAFDDSQPSLHEMGPSQPASGYSALEPPPLLGGDTDWAPGVGAVDLARGPAEEEKRPLAPEEEEDAGCRDLESLSPREDPEMSTALSRKVSDVTSSGVQSFDEEEGEANN

SEQ ID NO: 1019 - protein, 1178 aa, Homo Sapiens
MSLQSAQYLRQAEVLKADMTDSKLGPAEVWTSRQALQDLYQKMLVTDLEYALDKKVEQDLWNHAFKNQITTLQGQAKNRANPNRSEVQANLSLFLEAASGFYTQLLQELCTVFNVDLPCRVKSSQLGIISNKQTHTSAIVKPQSSSCSYICQHCLVHLGDIARYRNQTSQAESYYRHAAQLVPSNGQPYNQLAILASSKGDHLTTIFYYCRSIAVKFPFPAASTNLQKALSKALESRDEVKTKWGVSDFIKAFIKFHGHVYLSKSLEKLSPLREKLEEQFKRLLFQKAFNSQQLVHVTVINLFQLHHLRDFSNETEQHTYSQDEQLCWTQLLALFMSFLGILCKCPLQNESQEESYNAYPLPAVKVSMDWLRLRPRVFQEAVVDERQYIWPWLISLLNSFHPHEEDLSSISATPLPEEFELQGFLALRPSFRNLDFSKGHQGITGDKEGQQRRIRQQRLISIGKWIADNQPRLIQCENEVGKLLFITEIPELILEDPSEAKENLILQETSVIESLAADGSPGLKSVLSTSRNLSNNCDTGEKPVVTFKENIKTREVNRDQGRSFPPKEVKSQTELRKTPVSEARKTPVTQTPTQASNSQFIPIHHPGAFPPLPSRPGFPPPTYVIPPPVAFSMGSGYTFPAGVSVPGTFLQPTAHSPAGNQVQAGKQSHIPYSQQRPSGPGPMNQGPQQSQPPSQQPLTSLPAQPTAQSTSQLQVQALTQQQQSPTKAVPALGKSPPHHSGFQQYQQADASKQLWNPPQVQGPLGKIMPVKQPYYLQTQDPIKLFEPSLQPPVMQQQPLEKKMKPFPMEPYNHNPSEVKVPEFYWDSSYSMADNRSVMAQQANIDRRGKRSPGVFRPEQDPVPRMPFEDPKSSPLLPPDLLKSLAALEEEEELIFSNPPDLYPALLGPLASLPGRSLFKSLLEKPSELMSHSSSFLSLTGFSLNQERYPNNSMFNEVYGKNLTSSSKAELSPSMAPQETSLYSLFEGTPWSPSLPASSDHSTPASQSPHSSNPSSLPSSPPTHNHNSVPFSNFGPIGTPDNRDRRTADRWKTDKPAMGGFGIDYLSATSSSESSWHQASTPSGTWTGHGPSMEDSSAVLMESLKKQQHGVQQLGPKRQSEEEGSSSICVAHRGPRPLPSCSLPASTFRVKFKAARTCAHQAQKKTRRRPFWKRRKKGK

SEQ ID NO: 1020 - protein, 361 aa, Homo Sapiens
MYGKGKSNSSAVPSDSQAREKLALYVYEYLLHVGAQKSAQTFLSEIRWEKNITLGEPPGFLHSWWCVFWDLYCAAPERRETCEHSSEAKAFHDYSAAAAPSPVLGNIPPGDGMPVGPVPPGFFQPFMSPRYPGGPRPPLRIPNQALGGVPGSQPLLPSGMDPTRQQGHPNMGGPMQRMTPPRGMVPLGPQNYGGAMRPPLNALGGPGMPGMNMGPGGGRPWPNPTNANSIPYSSASPGNYVGPPGGGGPPGTPIMPSPADSTNSGDNMYTLMNAVPPGPNRPNFPMGPGSDGPMGGLGGMESHHMNGSLGSGDMDSISKNSPNNMSLSNQPGTPRDDGEMGGNFLNPFQSESYSPSMTMSV

SEQ ID NO: 1021 - protein, 250 aa, Homo Sapiens
MSIFTPTNQIRLTNVAVVRMKRAGKRFEIACYKNKVVGWRSGVEKDLDEVLQTHSVFVNVSKGQVAKKEDLISAFGTDDQTEICKQILTKGEVQVSDKERHTQLEQMFRDIATIVADKCVNPETKRPYTVILIERAMKDIHYSVKTNKSTKQQALEVIKQLKEKMKIERAHMRLRFILPVNEGKKLKEKLKPLIKVIESEDYGQQLEIVCLIDPGCFREIDELIKKETKGKGSLEVLNLKDVEEGDEKFE

SEQ ID NO: 1022 - protein, 489 aa, Homo Sapiens
MKELDPKNDISEDKLSVVGEATGGPTRNGARGPGSEGVWEPGSWPERPRGDAGAEWEPLGIPQGNKLLGGSVPACHELKAFANQGCVLVPPRLDDPTEKGACPPVRRGKNFSSTSDLSKPPMPCEEKKTYDCSECGKAFSRSSSLIKHQRIHTGEKPFECDTCGKHFIERSSLTIHQRVHTGEKPYACGDCGKAFSQRMNLTVHQRTHTGEKPYVCDVCGKAFRKTSSLTQHERIHTGEKPYACGDCGKAFSQNMHLIVHQRTHTGEKPYVCPECGRAFSQNMHLTEHQRTHTGEKPYACKECGKAFNKSSSLTLHQRNHTGEKPYVCGECGKAFSQSSYLIQHQRFHIGVKPFECSECGKAFSKNSSLTQHQRIHTGEKPYECYICKKHFTGRSSLIVHQIVHTGEKPYVCGECGKAFSQSAYLIEHQRIHTGEKPYRCGQCGKSFIKNSSLTVHQRIHTGEKPYRCGECGKTFSRNTNLTRHLRIHT

SEQ ID NO: 1023 - protein, 380 aa, Homo Sapiens [sequence omitted]

SEQ ID NO: 1024 - protein, 312 aa, Homo Sapiens
MAAGVDCGDGVGARQHVFLVSEYLKDASKKMKNGLMFVKLVNPCSGEGAIYLFNMCLQQLFEVKVFKEKHHSWFINQSVQSGGLLHFATPVDPLFLLLHYLIKADKEGKFQPLDQVVVDNVFPNCILLLKLPGLEKLLHHVTEEKGNPEIDNKKYYKYSKEKTLKWLEKKVNQTVAALKTNNVNVSSRVQSTAFFSGDQASTDKEEDYIRYAHGLISDYIPKELSDDLSKYLKLPEPSASLPNPPSKKIKLSDEPVEAKEDYTKFNTKDLKTEKKNSKMTAAQKALAKVDKSGMKSIDTFFGVKNKKKIGKV

SEQ ID NO: 1025 - protein, 773 aa, Homo Sapiens
MARSSSLGRECGTPRSGLGKGGPPRPQGPQARCTLGRRCTVSGKCRRPRPSWTMAPPRNVVKIAIKMRDAIPQLIQLDQAKPLAAVLKEVCDAWSLTHSERYALQFADGHRRYITENNRAEIKNGSILCLSTAPDLEAEQLLGGLQSNSPEGRREALRRLVPLASDMIFAREVISRNGLQILGTIIEDGDDLGEVLALSLRAFSELMEHGVVSWETLSIPFVRKVVCYVNMNLMDASVPPLALGLLESVTLSSPALGQLVKSEVPLDRLLVHLQVMNQQLQTKAMALLTALLQGASPVERKHMLDYLWQRNLRQFIYKNIIHSAAPMGDEMAHHLYVLQALMLGLLEPRMRTPLDPYSQEQREQLQVLRQAAFEVEGESSGAGLSADRRRSLCAREFRKLGFSNSNPAQDLERVPPGLLALDNMLYFSRNAPSAYSRFVLENSSREDKHECPFARGSIQLTVLLCELLRVGEPCSETAQDFSPMFFGQDQSFHELFCVGIQLLNKTWKEMRATQEDFDKVMQVVREQLARTLALKPTSLELFRTKVNALTYGEVLRLRQTERLHQEGTLAPPILELREKLKPELMGLIRQQRLLRLCEGTLFRKISSRRRQDKLWFCCLSPNHKLLQYGDMEEGASPPTLESLPEQLPVADMRALLTGKDCPHVREKGSGKQNKDLYELAFSISYDRGEEEAYLNFIAPSKREFYLWTDGLSALLGSPMGSEQTRLDLEQLLTMETKLRLLELENVPIPERPPPVPPPPTNFNFCYDCSIAEP

SEQ ID NO: 1026 - protein, 247 aa, Homo Sapiens
MAPLRFSANLSWLFPELSGLPARVRAAGSSGFEAVEVAWPYAETPEALARAAREAGLRLVLINTPPGDQEKGEMGLGAVPGRQAAFREGLEQAVRYAKALGCPRIHLMAGRVPQGADRIAVKAEMEAVFLENLRHAAGVLAQEDLVGLLEPINTRITDPQYFLDTPQQAAAILQKVGRPNLQLQMDIFHWQIMDGNLTGNIREFLPIVGHVQVAQVPGRGEPSSPGELNFPYLFQLLEDEGYKGFVG

SEQ ID NO: 1027 - protein, 282 aa, Homo Sapiens
MASSFLPAGAITGDSGGELSSGDDSGEVEFPHSPEIEETSCLAELFEKAAAHLQGLIQVASREQLLYLYARYKQVKVGNCNTPKPSFFDFEGKQKWEAWKALGDSSPSQAMQEYIAVVKKLDPGWNPQIPEKKGKEANTGFGGPVISSLYHEETIREEDKNIFDYCRENNIDHITKAIKSKNVDVNVKDEEGRALLHWACDRGHKELVTVLLQHRADINCQDNEGQTALHYASACEFLDIVELLLQSGADPTLRDQDGCLPEEVTGCKTVSLVLQRHTTGKA

SEQ ID NO: 1028 - protein, 702 aa, Homo Sapiens
MAQKHPGERGLYGAHHSGGASLRTLGPSVDPEIPSFSGLRDSAGTAPNGTRCLTEHSGPKHTQHPNPAHWLDPSHGPPGGPGPPRDAEDPDQSETSSEEESGVDQELSKENETGNQKDGNSFLSIPSACNCQGTPGIPEGPYSEGGNGSSSNFCHHCTSPALGEDELEEEYDDEESLKFPSDFSRVSSGKKPPSRRQRHRFPTKEDTREGGRRDPRSPGRHRLGRKRSQADKRKGLGLWGAEELCQLGQAGFWWLIELLVLVGEYVETCGHLIYACRQLKSSDLDLFRVWMGVWTGRLGGWAQVMFQFLSQGFYCGVGLFTRFLKLLGALLLLALALFLGFLQLGWRFLVGLGDRLGWRDKATWLFSWLDSPALQRCLTLLRDSRPWQRLVRIVQWGWLELPWVKQNINRQGNAPVASGRYCQPEEEVARLLTMAGVPEDELNPFHVLGVEATASDVELKKAYRQLAVMVHPDKNHHPRAEEAFKVLRAAWDIVSNAEKRKEYEMKRMAENELSRSVNEFLSKLQDDLKEAMNTMMCSRCQGKHRRFEMDREPKSARYCAECNRLHPAEEGDFWAESSMLGLKITYFALMDGKVYDITEWAGCQRVGISPDTHRVPYHISFGSRIPGTRGRQRATPDAPPADLQDFLSRIFQVPPGQMPNGNFFAAPQPAPGAAAASKPNSTVPKGEAKPKRRKKVRRPFQR

SEQ ID NO: 1029 - protein, 618 aa, Homo Sapiens
MERAVEPWGPDLHRPEEREPQRGARTGLGSENVISQPNEFEHTPQEDDLGFKEEDLAPDHEVGNASLKPEGIQNWDDLWVQREGLGKPQPRDRGPRLLGEPRWGQASSDRAAVCGECGKSFRQMSDLVKHQRTHTGEKPYKCGVCGKGFGDSSARIKHQRTHSGEKPYRARPPAQGPPKIPRSRIPAGERPTICGECGKSFRQSSDLVKHQRTHTGEKPYKCGICGKGFGDSSARIKHQRTHRGEQPPRPVVPRRQPSRAATAATQGPKAQDKPYICTDCGKRFVLSCSLLSHQRSHLGPKPFGCDVCGKEFARGSDLVKHLRVHTGEKPYLCPECGKGFADSSARVKHLRTHSGERPHACPECDRTFSLSSTLLRHRLTHMEPQDFSFPGYPLPALIPSPPPPPLGTSPPLTPRSPSHSGEPFGLPGLEPEPGGPQAGEPPPPLAGDKPHKCPECGKGFRRSSDLVKHHRVHTGEKPYLCPECGKGFADSSARVKHLRTHRGERARPPPPSTLLRPHNPPGPVPMAPRPRVRAQPSGPSQPHVCGFCGKEFPRSSDLVKHRRTHTGEKPYKCAECGKGFGDSSARIKHQRGHLVLTPFGIGDGRARPLKQEAATGLE

SEQ ID NO: 1030 - protein, 318 aa, Homo Sapiens
MPKRGKKGAVAEDGDELRTEPEAKKSKTAAKKNDKEAAGEGPALYEDPPDQKTSPSGKPATLKICSWNVDGLRAWIKKKGLDWVKEEAPDILCLQETKCSENKLPAELQELPGLSHQYWSAPSDKEGYSGVGLLSRQCPLKVSYGIGDEEHDQEGRVIVAEFDSFVLVTAYVPNAGRGLVRLEYRQRWDEAFRKFLKGLASRKPLVLCGDLNVAHEEIDLRNPKGNKKNAGFTPQERQGFGELLQAVPLADSFRHLYPNTPYAYTFWTYMMNARSKNVGWRLDYFLLSHSLLPALCDSKIRSKALGSDHCPITLYLAL

SEQ ID NO: 1031 - protein, 751 aa, Homo Sapiens
MAATGTAAAAATGRLLLLLLVGLTAPALALAGYIEALAANAGTGFAVAEPQIAMFCGKLNMHVNIQTGKWEPDPTGTKSCFETKEEVLQYCQEMYPELQITNVMEANQRVSIDNWCRRDKKQCKSRFVTPFKCLVGEFVSDVLLVPEKCQFFHKERMEVCENHQHWHTVVKEACLTQGMTLYSYGMLLPCGVDQFHGTEYVCCPQTKIIGSVSKEEEEEDEEEEEEEDEEEDYDVYKSEFPTEADLEDFTEAAVDEDDEDEEEGEEVVEDRDYYYDTFKGDDYNEENPTEPGSDGTMSDKEITHDVKAVCSQEAMTGPCRAVMPRWYFDLSKGKCVRFIYGGCGGNRNNFESEDYCMAVCKAMIPPTPLPTNDVDVYFETSADDNEHARFQKAKEQLEIRHRNRMDRVKKEWEEAELQAKNLPKAERQTLIQHFQAMVKALEKEAASEKQQLVETHLARVEAMLNDRRRMALENYLAALQSDPPRPHRILQALRRYVRAENKDRLHTIRHYQHVLAVDPEKAAQMKSQVMTHLHVIEERRNQSLSLLYKVPYVAQEIQEEIDELLQEQRADMDQFTASISETPVDVRVSSEESEEIPPFHPFHPFPALPENEGSGVGEQDGGLIGAEEKVINSKNKVDENMVIDETLDVKEMIFNAERVGGLEEERESVGPLREDFSLSSSALIGLLVIAVAIATVIVISLVMLRKRQYGTISHGIVEVDPMLTPEERHLNKMQNHGYENPTYKYLEQMQI

SEQ ID NO: 1032 - protein, 1502 aa, Homo Sapiens
MVHVARLLLLLLTFFLRTDAETPPRFTRTPVDQTGVSGGVASFICQATGDPRPKIVWNKKGKKVSNQRFEVIEFDDGSGSVLRIQPLRTPRDEAIYECVASNNVGEISVSTRLTVLREDQIPRGFPTIDMGPQLKVVERTRTATMLCAASGNPDPEITWFKDFLPVDTSNNNGRIKQLRSGGTPIRGALQIEQSEESDQGKYECVATNSAGTRYSAPANLYVRELREVRRVPPRFSIPPTNHEIMPGGSVNITCVAVGSPMPYVKWMLGAEDLTPEDDMPIGRNVLELNDVRQSANYTCVAMSTLGVIEAIAQITVKALPKPPGTPVVTESTATSITLTWDSGNPEPVSYYIIQHKPKNSEELYKEIDGVATTRYSVAGLSPYSDYEFRVVAVNNIGRGPPSEPVLTQTSEQAPSSAPRDVQARMLSSTTILVQWKEPEEPNGQIQGYRVYYTMDPTQHVNNWMKHNVADSQITTIGNLVPQKTYSVKVLAFTSIGDGPLSSDIQVITQTGVPGQPLNFKAEPESETSILLSWTPPRSDTIANYELVYKDGEHGEEQRITIEPGTSYRLQGLKPNSLYYFRLAARSPQGLGASTAEISARTMQSMFAKNFHVKAVMKTSVLLSWEIPENYNSAMPFKILYDDGKMVEEVDGRATQKLIVNLKPEKSYSFVLTNRGNSAGGLQHRVTAKTAPDVLRTKPAFIGKTNLDGMITVQLPEVPANENIKGYYIIIVPLKKSRGKFIKPWESPDEMELDELLKEISRKRRSIRYGREVELKPYIAAHFDVLPTEFTLGDDKHYGGFTNKQLQSGQEYVFFVLAVMEHAESKMYATSPYSDPVVSMDLDPQPITDEEEGLIWVVGPVLAVVFIICIVIAILLYKSKPDRKRAESDSRKSSIPNNKEIPSHHPTDPVELRRLNFQTPGMASHPPIPILELADHIERLKANDNLKFSQEYESIDPGQQFTWEHSNLEVNKPKNRYANVIAYDHSRVLLSAIEGIPGSDYVNANYIDGYRKQNAYIATQGSLPETFGDFWRMIWEQRSATVVMMTKLEERSRVKCDQYWPSRGTETHGLVQVTLLDTVELATYCVRTFALYKNGSSEKREVRQFQFTAWPDHGVPEHPTPFLAFLRRVKTCNPPDAGPMVVHCSAGVGRTGCFIVIDAMLERIKHEKTVDIYGHVTLMRAQRNYMVQTEDQYIFIHDALLEAVTCGNTEVPARNLYAYIQKLTQIETGENVTGMELEFKRLASSKAHTSRFISANLPCNKFKNRLVNIMPYESTRVCLQPIRGVEGSDYINASFIDGYRQQKAYIATQGPLAETTEDFWRMLWEHNSTIVVMLTKLREMGREKCHQYWPAERSARYQYFVVDPMAEYNMPQYILREFKVTDARDGQSRTVRQFQFTDWPEQGVPKSGEGFIDFIGQVHKTKEQFGQDGPISVHCSAGVGRTGVFITLSIVLERMRYEGVVDIFQTVKMLRTQRPAMVQTEDQYQFSYRAALEYLGSFDHYAT

SEQ ID NO: 1033 - protein, 1147 aa, Homo Sapiens
MDIRKFFGVIPSGKKLVSETVKKNEKTKSDEETLKAKKGIKEIKVNSSRKEDDFKQKQPSKKKRIIYDSDSESEETLQVKNAKKPPEKLPVSSKPGKISRQDPVTYISETDEEDDFMCKKAASKSKENGRSTNSHLGTSNMKKNEENTKTKNKPLSPIKLTPTSVLDYFGTGSVQRSNKKMVASKRKELSQNTDESGLNDEAIAKQLQLDEDAELERQLHEDEEFARTLAMLDEEPKTKKARKDTEAGETFSSVQANLSKAEKHKYPHKVKTAQVSDERKSYSPRKQSKYESSKESQQHSKSSADKIGEVSSPKASSKLAIMKRKEESSYKEIEPVASKRKENAIKLKGETKTPKKTKSSPAKKESVSPEDSEKKRTNYQAYRSYLNREGPKALGSKEIPKGAENCLEGLIFVITGVLESIERDEAKSLIERYGGKVTGNVSKKTNYLVMGRDSGQSKSDKAAALGTKIIDEDGLLNLIRTMPGKKSKYEIAVETEMKKESKLERTPQKNVQGKRKISPSKKESESKKSRPTSKRDSLAKTIKKETDVFWKSLDFKEQVAEETSGDSKARNLADDSSENKVENLLWVDKYKPTSLKTIIGQQGDQSCANKLLRWLRNWQKSSSEDKKHAKFGKFSGKDDGSSFKAALLSGPPGVGKTTTASLVCQELGYSYVELNASDTRSKSSLKAIVAESLNNTSIKGFYSNGAASSVSTKHALIMDEVDGMAGNEDRGGIQELIGLIKHTKIPIICMCNDRNHPKIRSLVHYCFDLRFQRPRVEQIKGAMMSIAFKEGLKIPPPAMNEIILGANQDIRQVLHNLSMWCARSKALTYDQAKADSHRAKKDIKMGPFDVARKVFAAGEETAHMSLVDKSDLFFHDYSIAPLFVQENYIHVKPVAAGGDMKKHLMLLSRAADSICDGDLVDSQIRSKQNWSLLPAQAIYASVLPGELMRGYMTQFPTFPSWLGKHSSTGKHDRIVQDLALHMSLRTYSSKRTVNMDYLSLLRDALVQPLTSQGVDGVQDVVALMDTYYLMKEDFENIMEISSWGGKPSPFSKLDPKVKAAFTRAYNKEAHLTPYSLQAIKASRHSTSPSLDSEYNEELNEDDSQSDEKDQDAIETDAMIKKKTKSSKPSKPEKDKEPRKGKGKSSKK

SEQ ID NO: 1034 - protein, 360 aa, Homo Sapiens
MLGSGFKAERLRVNLRLVINRLKLLEKKKTELAQKARKEIADYLAAGKDERARIRVEHIIREDYLVEAMEILELYCDLLLARFGLIQSMKELDSGLAESVSTLIWAAPRLQSEVAELKIVADQLCAKYSKEYGKLCRTNQIGTVNDRLMHKLSVEAPPKILVERYLIEIAKNYNVPYEPDSVVMAEAPPGVETDLIDVGFTDDVKKGGPGRGGSGGFTAPVGGPDGTVPMPMPMPMPMPSANTPFSYPLPKGPSDFNGLPMGTYQAFPNIHPPQIPATPPSYESMTLMLIRISLLHRLLVLDPSQKPLQSFLPDLQITMTTLSYQSCHLCQTHYQLHLLVPAPQHLKTLTLMIFPGGLKS

SEQ ID NO: 1035 - protein, 360 aa, Homo Sapiens [sequence omitted]

SEQ ID NO: 1036 - protein, 252 aa, Homo Sapiens
MQLTRCCFVFLVQGSLYLVICGQDDGPPGSEDPERDDHEGQPRPRVPRKRGHISPKSRPMANSTLLGLLAPPGEAWGILGQPPNRPNHSPPPSAKVKKIFGWGDFYSNIKTVALNLLVTGKIVDHGNGTFSVHFQHNATGQGNISISLVPPSKAVEFHQEQQIFIEAKASKIFNCRMEWEKVERGRRTSLCTHDPAKICSRDHAQSSATWSCSQPFKVVCVYIAFYSTDYRLVQKVCPDYNYHSDTPYYPSG

SEQ ID NO: 1037 - protein, 890 aa, Homo Sapiens
MDSERQVKDTDDIESPKRSIRDSGYIDCWDSERSDSLSPPRHGRDDSFDSLDSFGSRSRQTPSPDVVLRGSSDGRGSDSESDLPHRKLPDVKKDDMSARRTSHGEPKSAVPFNQYLPNKSNQTAYVPAPLRKKKAEREEYRKSWSTATSPLGGERPFRSTSMFDMRCEEEAAVQPHSRARQEQLQLINNQLREEDDKWQDDLARWKSRRRSVSQDLIKKEEERKKMEKLLAGEDGTSERRKSIKTYREIVQEKERRERELHEAYKNARSQEEAEGILQQYIERFTISEAVLERLEMPKILERSHSTEPNLSSFLNDPNPMKYLRQQSLPPPKFTATVETTIARASVLDTSMSAGSGSPSKTVTPKAVPMLTPKPYSQPKNSQDVLKTFKVDGKVSVNGETVHREEEKERECPTVAPAHSLTKSQMFEGVARVHGSPLELKQDNGSIEINIKKPNSVPQELAATTEKTEPNSQEDKNDGGKSRKGNIELASSEPQHFTTTVTRCSPTVAFVEFPSSPQLKNDVSEEKDQKKPENEMSGKVELVLSQKVVKPKSPEPEATLTFPFLDKMPEANQLHLPNLNSQVDSPSSEKSPVMTPFKFWAWDPEEERRRQEKWQQEQERLLQERYQKEQDKLKEEWEKAQKEVEEEERRYYEEERKIIEDTVVPFTVSSSSADQLSTSSSMTEGSGTMNKIDLGNCQDEKQDRRWKKSFQGDDSDLLLKTRESDRLEEKGSLTEGALAHSGNPVSKGVHEDHQLDTEAGAPHCGTNPQLAQDPSQNQQTSNPTHSSEDVKPKTLPLDKSINHQIESPSERRKSISGKKLCSSCGLPLGKGAAMIIETLNLYFHIQCFRCGICKGQLGDAVSGTDVRIRNGLLNCNDCYMRSRSAGQPTTL

SEQ ID NO: 1038 - protein, 1377 aa, Homo Sapiens
MDALNRNQIGPGCQTQTMVQKGPLDLIETGKGLKVQTDKPHLVSLGSGRLSTAITLLPLEEGRTVIGSAARDISLQGPGLAPEHCYIENLRGTLTLYPCGNACTIDGLPVRQPTRLTQGCMLCLGQSTFLRFNHPAEAKWMKSMIPAGGRAPGPPYSPVPAESESLVNGNHTPQTATRGPSACASHSSLVSSIEKDLQEIMDSLVLEEPGAAGKKPAATSPLSPMANGGRYLLSPPTSPGAMSVGSSYENTSPAFSPLSSPASSGSCASHSPSGQEPGPSVPPLVPARSSSYHLALQPPQSRPSGARSESPRLSRKGGHERPPSPGLRGLLTDSPAATVLAEARRATESPRLGGQLPVVAISLSEYPASGALSQPTSIPGSPKFQPPVPAPRNKIGTLQDRPPSPFREPPGSERVLTTSPSRQLVGRTFSDGLATRTLQPPESPRLGRRGLDSMRELPPLSPSLSRRALSPLPTRTTPDPKLNREVAESPRPRRWAAHGASPEDFSLTLGARGRRTRSPSPTLGESLAPHKGSFSGRLSPAYSLGSLTGASPCQSPCVQRKLSSGDLRVPVTRERKNSITEISDNEDDLLEYHRRQRQERLREQEMERLERQRLETILNLCAEYSRADGGPEAGELPSIGEATAALALAGRRPSRGLAGASGRSSEEPGVATQRLWESMERSDEENLKEECSSTESTQQEHEDAPSTKLQGEVLALEEERAQVLGHVEQLKVRVKELEQQLQESAREAEMERALLQGEREAERALLQKEQKAVDQLQEKLVALETGIQKERDKEAEALETETKLFEDLEFQQLERESRVEEERELAGQGLLRSKAELLRSIAKRKERLAILDSQAGQIRAQAVQESERLARDKNASLQLLQKEKEKLTVLERRYHSLTGGRPFPKTTSTLKEMEKLLLPAVDLEQWYQELMAGLGTGPAAASPHSSPPPLPAKASRQLQVYRSKMDGEATSPLPRTRSGPLPSSSGSSSSSSQLSVATLGRSPSPKSALLTQNGTGSLPRNLAATLQDIETKRQLALQQKGQQVIEEQRRRLAELKQKAAAEAQCQWDALHGAAPFPAGPSGFPPLMHHSILHHLPAGRERGEEGEHAYDTLSLESSDSMETSISTGGNSACSPDNMSSASGLDMGKIEEMEKMLKEAHAEKNRLMESREREMELRRQALEEERRRREQVERRLQSESARRQQLVEKEVKMREKQFSQARPLTRYLPIRKEDFDLKTHIESSGHGVDTCLHVVLSSKVCRGYLVKMGGKIKSWKKRWFVFDRLKRTLSYYVDKHETKLKGVIYFQAIEEVYYDHLRSAAKKRFFRFTMVTESPNPALTFCVKTHDRLYYMVAPSAEAMRIWMDVIVTGAEGYTQFMN

SEQ ID NO: 1039 - protein, 1883 aa, Homo Sapiens
MGKRAGGGATGATTAAVSTSAGAGLEPAAARSGGPRSAAAGLLGALHLVMTLVVAAARAEKEAFVQSESIIEVLRFDDGGLLQTETTLGLSSYQQKSISLYRGNCRPIRFEPPMLDFHEQPVGMPKMEKVYLHNPSSEETITLVSISATTSHFHASFFQNRKILPGGNTSFDVVFLARVVGNVENTLFINTSNHGVFTYQVFGVGVPNPYRLRPFLGARVPVNSSFSPIINIHNPHSEPLQVVEMYSSGGDLHLELPTGQQGGTRKLWEIPPYETKGVMRASFSSREADNHTAFIRIKTNASDSTEFIILPVEVEVTTAPGIYSSTEMLDFGTLRTQDLPKVLNLHLLNSGTKDVPITSVRPTPQNDAITVHFKPITLKASESKYTKVASISFDASKAKKPSQFSGKITVKAKEKSYSKLEIPYQAEVLDGYLGFDHAATLFHIRDSPADPVERPIYLTNTFSFAILIHDVLLPEEAKTMFKVHNFSKPVLILPNESGYIFTLLFMPSTSSMHIDNNILLITNASKFHLPVRVYTGFLDYFVLPPKIEERFIDFGVLSATEASNILFAIINSNPIELAIKSWHIIGDGLSIELVAVERGNRTTIISSLPEFEKSSLSDQSSVTLASGYFAVFRVKLTAKKLEGIHDGAIQITTDYEILTIPVKAVIAVGSLTCFPKHVVLPPSFPGKIVHQSLNIMNSFSQKVKIQQIRSLSEDVRFYYKRLRGNKEDLEPGKKSKIANIYFDPGLQCGDHCYVGLPFLSKSEPKVQPGVAMQEDMWDADWDLHQSLFKGWTGIKENSGHRLSAIFEVNTDLQKNIISKITAELSWPSILSSPRHLKFPLTNTNCSSEEEITLENPADVPVYVQFIPLALYSNPSVFVDKLVSRFNLSKVAKIDLRTLEFQVFRNSAHPLQSSTGFMEGLSRHLILNLILKPGEKKSVKVKFTPVHNRTVSSLIIVRNNLTVMDAVMVQGQGTTENLRVAGKLPGPGSSLRFKITEALLKDCTDSLKLREPNFTLKRTFKVENTGQLQIHIETIEISGYSCEGYGFKVVNCQEFTLSANASRDIIILFTPDFTASRVIRELKFITTSGSEFVFILNASLPYHMLATCAEALPRPNWELALYIIISGIMSALFLLVIGTAYLEAQGIWEPFRRRLSFEASNPPFDVGRPFDLRRIVGISSEGNLNTLSCDPGHSRGFCGAGGSSSRPSAGSHKQCGPSVHPHSSHSNRNSADVENVRAKNSSSTSSRTSAQAASSQSANKTSPLVLDSNTVTQGHTAGRKSKGAKQSQHGSQHHAHSPLEQHPQPPLPPPVPQPQEPQPERLSPAPLAHPSHPERASSARHSSEDSDITSLIEAMDKDFDHHDSPALEVFTEQPPSPLPKSKGKGKPLQRKVKPPKKQEEKEKKGKGKPQEDELKDSLADDDSSSTTTETSNPDTEPLLKEDTEKQKGKQAMPEKHESEMSQVKQKSKKLLNIKKEIPTDVKPSSLELPYTPPLESKQRRNLPSKIPLPTAMTSGSKSRNAQKTKGTSKLVDNRPPALAKFLPNSQELGNTSSSEGEKDSPPPEWDSVPVHKPGSSTDSLYKLSLQTLNADIFLKQRQTSPTPASPSPPAAPCPFVARGSYSSIVNSSSSSDPKIKQPNGSKHKLTKAASLPGKNGNPTFAAVTAGYDKSPGGNGFAKVSSNKTGFSSSLGISHAPVDSDGSDSSGLWSPVSNPSSPDFTPLNSFSAFGNSFNLTGEVFSKLGLSRSCNQASQRSWNEFNSGPSYLWESPATDPSPSWPASSGSPTHTATSVLGNTSGLWSTTPFSSSIWSSNLSSALPFTTPANTLASIGLMGTENSPAPHAPSTSSPADDLGQTYNPWRIWSPTIGRRSSDPWSNSHFPHEN

SEQ ID NO: 1040 - protein, 124 aa, Homo Sapiens
MSYIPGQPVTAVVQRVEIHKLRQGENLILGFSIGGGIDQDPSQNPFSEDKTDKGIYVTRVSEGGPAEIAGLQIGDKIMQVNGWDMTMVTHDQARKRLTKRSEEVVRLLVTRQSLQKAVQQSMLS

SEQ ID NO: 1041 - protein, 316 aa, Homo Sapiens
RMEENSSGNTMSASSMFNTEERKCLQTHRVTVHGVPGPEPFTVFTINGGTKAKQLLQQILTNEQDIKPVTTDYFLMEEKYFISKEKNECRKQPFQRAIGPEEEIMQILSSWFPEEGYMGRIVLKTQQENLEEKNIVQDDKEVILSSEEESFFVQVHDVSPEQPRTVIKAPRVSTAQDVIQQTLCKAKYSYSILSNPNPSDYVLLEEVVKDTTNKKTTTPKSSQRVLLDQECVFQAQSKWKGAGKFILKLKEQVQASREDKKKGISFASELKKLTKSTKQPRGLTSPSQLLTSESIQTKEEKPVGGLSSSDTMDYRQ

SEQ ID NO: 1042 - protein, 1232 aa, Homo Sapiens
MAEAASGAGGTSLEGERGKRPPPEGEPAAPASGVLDKLFGKRLLQAGRYLVSHKAWMKTVPTENCDVLMTFPDTTDDHTLLWLLNHIRVGIPELIVQVRHHRHTRAYAFFVTATYESLLRGADELGLRKAVKAEFGGGTRGFSCEEDFIYENVESELRFFTSQERQSIIRFWLQNLRAKQGEALHNVRFLEDQPIIPELAARGIIQQVFPVHEQRILNRLMKSWVQAVCENQPLDDICDYFGVKIAMYFAWLGFYTSAMVYPAVFGSVLYTFTEADQTSRDVSCVVFALFNVIWSTLFLEEWKRRGAELAYKWGTLDSPGEAVEEPRPQFRGVRRISPITRAEEFYYPPWKRLLFQLLVSLPLCLACLVCVFLLMLGCFQLQELVLSVKGLPRLARFLPKVMLALLVSVSAEGYKKLAIWLNDMENYRLESAYEKHLIIKVVLFQFVNSYLSLFYIGFYLKDMERLKEMLATLLITRQFLQNVREVLQPHLYRRLGRGELGLRAVWELARALLGLLSLRRPAPRRLEPQADEGGGGGSGGGGRRCLSGGCGAPEEEEEAALVERRRAGEGGEEGDGPPGGKEEDEDDEEEEDEEEEEDEEEGEEGGLLDCGLRLKKVSFAERGAGRRRPGPSPEALLEEGSPTMVEKGLEPGVFTLAEEDDEAEGAPGSPEREPPAILFRRAGGEGRDQGPDGGPDPEPGSNSDSTRRQRRQNRSSWIDPPEEEHSPQLTQAELESCMKKYEDTFQDYQEMFVQFGYVVLFSSAFPLAALCALVNNLIEIRSDAFKLCTGLQRPFGQRVESIGQWQKVMEAMGVLAIVVNCYLIGQCGQLQRLFPWLSPEAAIVSVVVLEHFALLLKYLIHVAIPDIPGWVAEEMAKLEYQRREAFKRHERQAQHRYQQQQRRRREEEERQRHAEHHARREHDSGGREEARAEGSGLDPATSSEKASAKAKGSTAGGHGPERPKRPGSLLAPNNVMKLKQIIPLQGKFLSSGATSSLAAAGAGATTRPPPAQSPTGSDTRLPAFLSFKFLKSPETRRDSERSHSPPKAFHAGKLFPFGGTRAEPGSNGAGGQARPDGTPSSGSSRVQRSGPVDEALAEELEAPRPEEEGSGTALAPVGAPALRTRRSRSPAPPPPMPLPRPPTPPAGCWQWDGPWGCGGEGAAPRQALAAAECPPCAMAGPPPAPQPLPGDASFYSLPPPPLPPTSDPLETPAPSPSPSPSPQAVCWPSGWH

SEQ ID NO: 1043 - protein, 478 aa, Homo Sapiens
MLSDELESKPELLVQFVQNTSIPLGQGLVESEAKDITCLSLLPVTEASECSRLMLPDDTTNHSNSSKEVPSSAVLRSLRVNVGPDGEETRAQTVQKSPEFLSTSESSSLLQDLQPSDSTSFILLNLTRAGLGSSAEHLVFVQDEAEDSGNDFLSSESTDSSIPWFLRVQELAHDSLIAATRAQLAKNAKTSSNGENVHLGSGDGQSKDSGPLPQVEKKLKCTVEGCDRTFVWPAHFKYHLKTHRNDRSFICPAEGCGKSFYVLQRLKVHMRTHNGEKPFMCHESGCGKQFTTAGNLKNHRRIHTGEKPFLCEAQGCGRSFAEYSSLRKHLVVHSGEKPHQCQVCGKTFSQSGSRNVHMRKHHLQLGAAGSQEQEQTAEPLMGSSLLEEASVPSKNLVSMNSQPSLGGESLNLPNTNSILGVDDEVLAEGSPRSLSSVPDVTHHLVTMQSGRQSYEVSVLTAVNPQELLNQGDLTERRT

SEQ ID NO: 1044 - protein, 410 aa, Homo Sapiens
MPGVCDRAPDFLSPSEDQVLRPALGSSVALNCTAWVVSGPHCSLPSVQWLKDGLPLGIGGHYSLHEYSWVKANLSEVLVSSVLGVNVTSTEVYGAFTCSIQNISFSSFTLQRAGPTSHVAAVLASLLVLLALLLAALLYVKCRLNVLLWYQDAYGEVEINDGKLYDAYVSYSDCPEDRKFVNFILKPQLERRRGYKLFLDDRDLLPRAEPSADLLVNLSRCRRLIVVLSDAFLSRAWCSHSFREGLCRLLELTRRPIFITFEGQRRDPAHPALRLLRQHRHLVTLLLWRPGSVTPSSDFWKEVQLALPRKVQYRPVEGDPQTQLQDDKDPMLILRGRVPEGRALDSEVDPDPEGDLGVRGPVFGEPSAPPHTSGVSLGESRSSEVDVSDLGSRNYSARTDFYCLVSKDDM

SEQ ID NO: 1045 - protein, 368 aa, Homo Sapiens
MAYSTVQRVALASGLVLALSLLLPKAFLSRGKRQEPPPTPEGKLGRFPPMMHHHQAPSDGQTPGARFQRSHLAEAFAKAKGSGGGAGGGGSGRGLMGQIIPIYGFGIFLYILYILFKLSKGKTTAEDGKCYTAMPGNTHRKITSFELAQLQEKLKETEAAMEKLINRVGPNGERAQTVTSDQEKRLLHQLREITRVMKEGKFIDRFSPEKEAEEAPYMEDWEGYPEETYPIYDLSDCIKRRQETILVDYPDPKELSAEEIAERMGMIEEEESDHLGWESLPTDPRAQEDNSVTSCDPKPETCSCCFHEDEDPAVLAENAGFSADSYPEQEETTKEEWSQDFKDEGLGISTDKAYTGSMLRKRNPQGLE

SEQ ID NO: 1046 - protein, 679 aa, Homo Sapiens
MGQAAEPTGYMENSVSYSAIEDVQLLSWENAPKYCLQLTIPGGTVLLQAANSYLRDQWFHSLQWKKKIYKYKKVLSNPSRWEVVLKEIRTLVDMALTSPLQDDSINQAPLEIVSKLLSENTNLTTQEHENIIVAIAPLLENNHPPPDLCEFFCKHCRERPRSMVVIEVFTPVVQRILKHNMDFGKCPRLRLFTQEYILALNELNAGMEVVKKFIQSMHGPTGHCPHPRVLPNLVAVCLAAIYSCYEEFINSRDNSPSLKEIRNGCQQPCDRKPTLPLRLLHPSPDLVSQEATLSEARLKSVVVASSEIHVEVERTSTAKPALTASAGNDSEPNLIDCLMVSPACSTMSIELGPQADRTLGCYVEILKLLSDYDDWRPSLASLLQPIPFPKEALAHEKFTKELKYVIQRFAEDPRQEVHSCLLSVRAGKDGWFQLYSPGGVACDDDGELFASMVHILMGSCYKTKKFLLSLAENKLGPCMLLALRGNQTMVEILCLMLEYNIIDNNDTQLQIISTLESTDVGKRMYEQLCDRQRELKELQRKGGPTRLTLPSKSTDADLARLLSSGSFGNLENLSLAFTNVTSACAEHLIKLPSLKQLNLWSTQFGDAGLRLLSEHLTMLQVLNLCETPVTDAGLLALSSMKSLCSLNMNSTKLSADTYEDLKAKLPNLKEVDVRYTEAW

SEQ ID NO: 1047 - protein, 481 aa, Homo Sapiens
MNEVSVIKEGWLHKRGEYIKTWRPRYFLLKSDGSFIGYKERPEAPDQTLPPLNNFSVAECQLMKTERPRPNTFVIRCLQWTTVIERTFHVDSPDEREEWMRAIQMVANSLKQRAPGEDPMDYKCGSPSDSSTTEEMEVAVSKARAKVTMNDFDYLKLLGKGTFGKVILVREKATGRYYAMKILRKEVIIAKDEVAHTVTESRVLQNTRHPFLTALKYAFQTHDRLCFVMEYANGGELFFHLSRERVFTEERARFYGAEIVSALEYLHSRDVVYRDIKLENLMLDKDGHIKITDFGLCKEGISDGATMKTFCGTPEYLAPEVLEDNDYGRAVDWWGLGVVMYEMMCGRLPFYNQDHERLFELILMEEIRFPRTLSPEAKSLLAGLLKKDPKQRLGGGPSDAKEVMEHRFFLSINWQDVVQKKLLPPFKPQVTSEVDTRYFDDEFTAQSITITPPDRYDSLGLLELDQRTHFPQFSYSASIRE

SEQ ID NO: 1048 - protein, 5171 aa, Homo Sapiens
MHSSSYSYRSSDSVFSNTTSTRTSLDSNENLLLVHCGPTLINSCISFGSESFDGHRLEMLQQIANRVQRDSVICEDKLILAGNALQSDSKRLESGVQFQNEAEIAGYILECENLLRQHVIDVQILIDGKYYQADQLVQRVAKLRDEIMALRNECSSVYSKGRILTTEQTKLMISGITQSLNSGFAQTLHPSLTSGLTQSLTPSLTSSSMTSGLSSGMTSRLTPSVTPAYTPGFPSGLVPNFSSGVEPNSLQTLKLMQIRKPLLKSSLLDQNLTEEEINMKFVQDLLNWVDEMQVQLDRTEWGSDLPSVESHLENHKNVHRAIEEFESSLKEAKISEIQMTAPLKLTYAEKLHRLESQYAKLLNTSRNQERHLDTLHNFVSRATNELIWLNEKEEEEVAYDWSERNTNIARKKDYHAELMRELDQKEENIKSVQEIAEQLLLENHPARLTIEAYRAAMQTQWSWILQLCQCVEQHIKENTAYFEFFNDAKEATDYLRNLKDAIQRKYSCDRSSSIHKLEDLVQESMEEKEELLQYKSTIANLMGKAKTIIQLKPRNSDCPLKTSIPIKAICDYRQIEITIYKDDECVLANNSHRAKWKVISPTGNEAMVPSVCFTVPPPNKEAVDLANRIEQQYQNVLTLWHESHINMKSVVSWHYLINEIDRIRASNVASIKTMLPGEHQQVLSNLQSRFEDFLEDSQESQVFSGSDITQLEKEVNVCKQYYQELLKSAEREEQEESVYNLYISEVRNIRLRLENCEDRLIRQIRTPLERDDLHESVFRITEQEKLKKELERLKDDLGTITNKCEEFFSQAAASSSVPTLRSELNVVLQNMNQVYSMSSTYIDKLKTVNLVLKNTQAAEALVKLYETKLCEEEAVIADKNNIENLISTLKQWRSEVDEKRQVFHALEDELQKAKAISDEMFKTYKERDLDFDWHKEKADQLVERWQNVHVQIDNRLRDLEGIGKSLKYYRDTYHPLDDWIQQVETTQRKIQENQPENSKTLATQLNQQKMLVSEIEMKQSKMDECQKYAEQYSATVKDYELQTMTYRAMVDSQQKSPVKRRRMQSSADLIIQEFMDLRTRYTALVTLMTQYIKFAGDSLKRLEEEEKSLEEEKKEHVEKAKELQKWVSNISKTLKDAEKAGKPPFSKQKISSEEISTKKEQLSEALQTIQLFLAKHGDKMTDEERNELEKQVKTLQESYNLLFSESLKQLQESQTSGDVKVEEKIVAERQQEYKEKLQGICDLLTQTENRLIGHQEAFMIGDGTVELKKYQSKQEELQKDMQGSAQALAEVVKNTENFLKENGEKLSQEDKALIEQKLNEAKIKCEQLNLKAEQSKKELDKVVTTAIKEETEKVAAVKQLEESKTKIENLLDWLSNVDKDSERAGTKHKQVIEQNGTHFQEGDGKSAIGEEDEVNGNLLETDVDGQVGTTQENLNQQYQKVKAQHEKIISQHQAVIIATQSAQVLLEKQGQYLSPEEKEKLQKNMKELKVHYETALAESEKKMKLTHSLQEELEKFDADYTEFEHWLQQSEQELENLEAGADDINGLMTKLKRQKSFSEDVISHKGDLRYITISGNRVLEAAKSCSKRDGGKVDTSATHREVQRKLDHATDRFRSLYSKCNVLGNNLKDLVDKYQHYEDASCGLLAGLQACEATASKHLSEPIAVDPKNLQRQLEETKALQGQISSQQVAVEKLKKTAEVLLDARGSLLPAKNDIQKTLDDIVGRYEDLSKSVNERNEKLQITLTRSLSVQDGLDEMLDWMGNVESSLKEQGQVPLNSTALQDIISKNIMLEQDIAGRQSSINAMNEKVKKFMETTDPSTASSLQAKMKDLSARFSEASHKHKETLAKMEELKTKVELFENLSEKLQTFLETKTQALTEVDVPGKDVTELSQYMQESTSEFLEHKKHLEVLHSLLKEISSHGLPSDKALVLEKTNNLSKKFKEMEDTIKEKKEAVTSCQEQLDAFQVLVKSLKSWIKETTKKVPIVQPSFGAEDLGKSLEDTKKLQEKWSLKTPEIQKVNNSGISLCNLISAVTTPAKAIAAVKSGGAVLNGEGTATNTEEFWANKGLTSIKKDMTDISHGYEDLGLLLKDKIAELNTKLSKLQKAQEESSAMMQWLQKMNKTATKWQQTPAPTDTEAVKTQVEQNKSFEAELKQNVNKVQELKDKLTELLEENPDTPEAPRWKQMLTEIDSKWQELNQLTIDRQQKLEESSNNLTQFQTVEAQLKQWLVEKELMVSVLGPLSIDPNMLNTQRQQVQILLQEFATRKPQYEQLTAAGQGILSRPGEDPSLRGIVKEQLAAVTQKWDSLTGQLSDRCDWIDQAIVKSTQYQSLLRSLSDKLSDLDNKLSSSLAVSTHPDAMNQQLETAQKMKQEIQQEKKQIKVAQALCEDLSALVKEEYLKAELSRQLEGILKSFKDVEQKAENHVQHLQSACASSHQFQQMSRDFQAWLDTKKEEQNKSHPISAKLDVLESLIKDHKDFSKTLTAQSHMYEKTIAEGENLLLKTQGSEKAALQLQLNTIKTNWDTFNKQVKERENKLKESLEKALKYKEQVETLWPWIDKCQNNLEEIKFCLDPAEGENSIAKLKSLQKEMDQHFGMVELLNNTANSLLSVCEIDKEVVTDENKSLIQKVDMVTEQLHSKKFCLENMTQKFKEFQEVSKESKRQLQCAKEQLDIHDSLGSQAYSNKYLTMLQTQQKSLQALKHQVDLAKRLAQDLVVEASDSKGTSDVLLQVETIAQEHSTLSQQVDEKCSFLETKLQGIGHFQNTIREMFSQFAEFDDELDSMAPVGRDAETLQKQKETIKAFLKKLEALMASNDNANKTCKMMLATEETSPDLVGIKRDLEALSKQCNKLLDRAQAREEQVEGTIKRLEEFYSKLKEFSILLQKAEEHEESQGPVGMETETINQQLNMFKVFQKEEIEPLQGKQQDVNWLGQGLIQSAAKSTSTQGLEHDLDDVNARWKTLNKKVAQRAAQLQEALLHCGRFQDALESLLSWMVDTEELVANQKPPSAEFKVVKAQIQEQKLLQRLLDDRKSTVEVIKREGEKIATTAEPADKVKILKQLSLLDSRWEALLNKAETRNRQLEGISVVAQQFHETLEPLNEWLTTIEKRLVNCEPIGTQASKLEEQIAQHKALEDDIINHNKHLHQAVSIGQSLKVLSSREDKDMVQSKLDFSQVWYIEIQEKSHSRSELLQQALCNAKIFGEDEVELMNWLNEVHDKLSKLSVQDYSTEGLWKQQSELRVLQEDILLRKQNVDQALLNGLELLKQTTGDEVLIIQDKLEAIKARYKDITKLSTDVAKTLEQALQLARRLHSTHEELCTWLDKVEVELLSYETQVLKGEEASQAQMRPKELKKEAKNNKALLDSLNEVSSALLELVPWRAREGLEKMVAEDNERYRLVSDTITQKVEEIDAAILRSQQFDQAADAELSWITETEKKLMSLGDIRLEQDQTSAQLQVQKTFTMEILRHKDIIDDLVKSGHKIMTACSEEEKQSMKKKLDKVLKNYDTICQINSERYLQLERAQSLVNQFWETYEELWPWLTETQSIISQLPAPALEYETLRQQQEEHRQLRELIAEHKPHIDKMNKTGPQLLELSPGEGFSIQEKYVAADTLYSQIKEDVKKRAVALDEAISQSTQFHDKIDQILESLERIVERLRQPPSISAEVEKIKEQISENKNVSVDMEKLQPLYETLKQRGEEMIARSGGTDKDISAKAVQDKLDQMVFIWENIHTLVEEREAKLLDVMELAEKFWCDHMSLIVTIKDTQDFIRDLEDPGIDPSVVKQQQEAAETIREEIDGLQEELDIVINLGSELIAACGEPDKPIVKKSIDELNSAWDSLNKAWKDRIDKLEEAMQAAVQYQDGLQAVFDWVDIAGGKLASMSPIGTDLETVKQQIEELKQFKSEAYQQQIEMERLNHQAELLLKKVTEESDKHTVQDPLMELKLIWDSLEERIINRQHKLEGALLALGQFQHALDELLAWLTHTEGLLSEQKPVGGDPKAIEIELAKHHVLQNDVLAHQSTVEAVNKAGNDLIESSAGEEASNLQNKLEVLNQRWQNVLEKTEQRKQQLDGALRQAKGFHGEIEDLQQWLTDTERHLLASKPLGGLPETAKEQLNVHMEVCAAFEAKEETYKSLMQKGQQMLARCPKSAETNIDQDINNLKEKWESVETKLNERKTKLEEALNLAMEFHNSLQDFINWLTQAEQTLNVASRPSLILDTVLFQIDEHKVFANEVNSHREQIIELDKTGTHLKYFSQKQDVVLIKNLLISVQSRWEKVVQRLVERGRSLDDARKRAKQFHEAWSKLMEWLEESEKSLDSELEIANDPDKIKTQLAQHKEFQKSLGAKHSVYDTTNRTGRSLKEKTSLADDNLKLDDMLSELRDKWDTICGKSVERQNKLEEALLFSGQFTDALQALIDWLYRVEPQLAEDQPVHGDIDLVMNLIDNHKAFQKELGKRTSSVQALKRSARELIEGSRDDSSWVKVQMQELSTRWETVCALSISKQTRLEAALRQAEEFHSVVHALLEWLAEAEQTLRFHGVLPDDEDALRTLIDQHKEFMKKLEEKRAELNKATTMGDTVLAICHPDSITTIKHWITIIRARFEEVLAWAKQHQQRLASALAGLIAKQELLEALLAWLQWAETTLTDKDKEVIPQEIEEVKALIAEHQTFMEEMTRKQPDVDKVTKTYKRRAADPSSLQSHIPVLDKGRAGRKRFPASSLYPSGSQTQIETKNPRVNLLVSKWQQVWLLALERRRKLNDALDRLEELREFANFDFDIWRKKYMRWMNHKKSRVMDFFRRIDKDQDGKITRQEFIDGILSSKFPTSRLEMSAVADIFDRDGDGYIDYYEFVAALHPNKDAYKPITDADKIEDEVTRQVAKCKCAKRFQVEQIGDNKYRFFLGNQFGDSQQLRLVRILRSTVMVRVGGGWMALDEFLVKNDPCRAKGRTNMELREKFILADGASQGMAAFRPRGRRSRPSSRGASPNRSTSVSSQAAQAASPQVPATTTPKILHPLTRNYGKPWLTNSKMSTPCKAAECSDFPVPSAEGTPIQGSKLRLPGYLSGKGFHSGEDSGLITTAAARVRTQFADSKKTPSRPGSRAGSKAGSRASSRRGSDASDFDISEIQSVCSDVETVPQTHRPTPRAGSRPSTAKPSKIPTPQRKSPASKLDKSSKR

SEQ ID NO: 1049 - protein, 740 aa, Homo Sapiens
MAAFSEMGVMPEIAQAVEEMDWLLPTDIQAESIPLILGGGDVLMAAETGSGKTGAFSIPVIQIVYETLKDQQEGKKGKTTIKTGASVLNKWQMNPYDRGSAFAIGSDGLCCQSREVKEWHGCRATKGLMKGKHYYEVSCHDQGLCRVGWSTMQASLDLGTDKFGFGFGGTGKKSHNKQFDNYGEEFTMHDTIGCYLDIDKGHVKFSKNGKDLGLAFEIPPHMKNQALFPACVLKNAELKFNFGEEEFKFPPKDGFVALSKAPDGYIVKSQHSGNAQVTQTKFLPNAPKALIVEPSRELAEQTLNNIKQFKKYIDNPKLRELLIIGGVAARDQLSVLENGVDIVVGTPGRLDDLVSTGKLNLSQVRFLVLDEADGLLSQGYSDFINRMHNQIPQVTSDGKRLQVIVCSATLHSFDVKKLSEKIMHFPTWVDLKGEDSVPDTVHHVVVPVNPKTDRLWERLGKSHIRTDDVHAKDNTRPGANSPEMWSEAIKILKGEYAVRAIKEHKMDQAIIFCRTKIDCDNLEQYFIQQGGGPDKKGHQFSCVCLHGDRKPHERKQNLERFKKGDVRFLICTDVAARGIDIHGVPYVINVTLPDEKQNYVHRIGRVGRAERMGLAISLVATEKEKVWYHVCSSRGKGCYNTRLKEDGGCTIWYNEMQLLSEIEEHLNCTISQVEPDIKVPVDEFDGKVTYGQKRAAGGGSYKGHVDILAPTVQELAALEKEAQTSFLHLGYLPNQLFRTF

SEQ ID NO: 1050 - protein, 432 aa, Homo Sapiens
MERRRITSAARRSYVSSGEMMVGGLAPGRRLGPGTRLSLARMPPPLPTRVDFSLAGALNAGFKETRASERAEMMELNDRFASYIEKVRFLEQQNKALAAELNQLRAKEPTKLADVYQAELRELRLRLDQLTANSARLEVERDNLAQDLATVRQKLQDETNLRLEAENNLAAYRQEADEATLARLDLERKIESLEEEIRFLRKIHEEEVRELQEQLARQQVHVELDVAKPDLTAALKEIRTQYEAMASSNMHEAEEWYRSKFADLTDAAARNAELLRQAKHEANDYRRQLQSLTCDLESLRGTNESLERQMREQEERHVREAASYQEALARLEEEGQSLKDEMARHLQEYQDLLNVKLALDIEIATYRKLLEGEENRITIPVQTFSNLQIRETSLDTKSVSEGHLKRNIVVKTVEMRDGEVIKESKQEHKDVM

SEQ ID NO: 1051 - protein, 517 aa, Homo Sapiens
MAALGPSSQNVTEYVVRVPKNTTKKYNIMAFNAADKVNFATWNQARLERDLSNKKIYQEEEMPESGAGSEFNRKLREEARRKKYGIVLKEFRPEDQPWLLRVNGKSGRKFKGIKKGGVTENTSYYIFTQCPDGAFEAFPVHNWYNFTPLARHRTLTAEEAEEEWERRNKVLNHFSIMQQRRLKDQDQDEDEEEKEKRGRRKASELRIHDLEDDLEMSSDASDASGEEGGRVPKAKKKAPLAKGGRKKKKKKGSDDEAFEDSDDGDFEGQEVDYMSDGSSSSQEEPESKAKAPQQEEGPKGVDEQSDSSEESEEEKPPEEDKEEEEEKKAPTPQEKKRRKDSSEESDSSEESDIDSEASSALFMAKKKTPPKRERKPSGGSSRGNSRPGTPSAEGGSTSSTLRAAASKLEQGKRVSEMPAAKRLRLDTGPQSLSGKSTPQPPSGKTTPNSGDVQVTEDAVRRYLTRKPMTTKDLLKKFQTKKTGLSSEQTVNVLAQILKRLNPERKMINDKMHFSLKE

SEQ ID NO: 1052 - protein, 641 aa, Homo Sapiens
MAKAAAIGIDLGTTYSCVGVFQHGKVEIIANDQGNRTTPSYVAFTDTERLIGDAAKNQVALNPQNTVFDAKRLIGRKFGDPVVQSDMKHWPFQVINDGDKPKVQVSYKGETKAFYPEEISSMVLTKMKEIAEAYLGYPVTNAVITVPAYFNDSQRQATKDAGVIAGLNVLRIINEPTAAAIAYGLDRTGKGERNVLIFDLGGGTFDVSILTIDDGIFEVKATAGDTHLGGEDFDNRLVNHFVEEFKRKHKKDISQNKRAVRRLRTACERAKRTLSSSTQASLEIDSLFEGIDFYTSITRARFEELCSDLFRSTLEPVEKALRDAKLDKAQIHDLVLVGGSTRIPKVQKLLQDFFNGRDLNKSINPDEAVAYGAAVQAAILMGDKSENVQDLLLLDVAPLSLGLETAGGVMTALIKRNSTIPTKQTQIFTTYSDNQPGVLIQVYEGERAMTKDNNLLGRFELSGIPPAPRGVPQIEVTFDIDANGILNVTATDKSTGKANKITITNDKGRLSKEEIERMVQEAEKYKAEDEVQRERVSAKNALESYAFNMKSAVEDEGLKGKISEADKKKVLDKCQEVISWLDANTLAEKDEFEHKRKELEQVCNPIISGLYQGAGGPGPGGFGAQGPKGGSGSGPTIEEVD

SEQ ID NO: 1053 - protein, 425 aa, Homo Sapiens
MASKEMFEDTVEERVINEEYKIWKKNTPFLYDLVMTHALQWPSLTVQWLPEVTKPEGKDYALHWLVLGTHTSDEQNHLVVARVHIPNDDAQFDASHCDSDKGEFGGFGSVTGKIECEIKINHEGEVNRARYMPQNPHIIATKTPSSDVLVFDYTKHPAKPDPSGECNPDLRLRGHQKEGYGLSWNSNLSGHLLSASDDHTVCLWDINAGPKEGKIVDAKAIFTGHSAVVEDVAWHLLHESLFGSVADDQKLMIWDTRSNTTSKPSHLVDAHTAEVNCLSFNPYSEFILATGSADKTVALWDLRNLKLKLHTFESHKDEIFQVHWSPHNETILASSGTDRRLNVWDLSKIGEEQSAEDAEDGPPELLFIHGGHTAKISDFSWNPNEPWVICSVSEDNIMQIWQMAENIYNDEESDVTTSELEGQGS

SEQ ID NO: 1054 - protein, 1118 aa, Homo Sapiens
MSVEAYGPSSQTLTFLDTEEAELLGADTQGSEFEFTDFTLPSQTQTPPGGPGGPGGGGAGGPGGAGAGAAAGQLDAQVGPEGILQNGAVDDSVAKTSQLLAELNFEEDEEDTYYTKDLPIHACSYCGIHDPACVVYCNTSKKWFCNGRGNTSGSHIVNHLVRAKCKEVTLHKDGPLGETVLECYNCGCRNVFLLGFIPAKADSVVVLLCRQPCASQSSLKDINWDSSQWQPLIQDRCFLSWLVKIPSEQEQLRARQITAQQINKLEELWKENPSATLEDLEKPGVDEEPQHVLLRYEDAYQYQNIFGPLVKLEADYDKKLKESQTQDNITVRWDLGLNKKRIAYFTLPKTDSDMRLMQGDEICLRYKGDLAPLWKGIGHVIKVPDNYGDEIAIELRSSVGAPVEVTHNFQVDFVWKSTSFDRMQSALKTFAVDETSVSGYIYHKLLGHEVEDVIIKCQLPKRFTAQGLPDLNHSQVYAVKTVLQRPLSLIQGPPGTGKTVTSATIVYHLARQGNGPVLVCAPSNIAVDQLTEKIHQTGLKVVRLCAKSREAIDSPVSFLALHNQIRNMDSMPELQKLQQLKDETGELSSADEKRYRALKRTAERELLMNADVICCTCVGAGDPRLAKMQFRSILIDESTQATEPECMVPVVLGAKQLILVGDHCQLGPVVMCKKAAKAGLSQSLFERLVVLGIRPIRLQVQYRMHPALSAFPSNIFYEGSLQNGVTAADRVKKGFDFQWPQPDKPMFFYVTQGQEEIASSGTSYLNRTEAANVEKITTKLLKAGAKPDQIGIITPYEGQRSYLVQYMQFSGSLHTKLYQEVEIASVDAFQGREKDFIILSCVRANEHQGIGFLNDPRRLNVALTRARYGVIIVGNPKALSKQPLWNHLLNYYKEQKVLVEGPLNNLRESLMQFSKPRKLVNTINPGARFMTTAMYDAREAIIPGSVYDRSSQGRPSSMYFQTHDQIGMISAGPSHVAAMNIPIPFNLVMPPMPPPGYFGQANGPAAGRGTPKGKTGRGGRQKNRFGLPGPSQTNLPNSQASQDVASQPFSQGALTQGYISMSQPSQMSQPGLSQPELSQDSYLGDEFKSQIDVALSQDSTYQGERAYQHGGVTGLSQY

SEQ ID NO: 1055 - protein, 669 aa, Homo Sapiens
MEKCSVGGLELTEQTPALLGNMAMATSLMDIGDSFGHPACPLVSRSRNSPVEDDDDDDDVVFIESIQPPSISAPAIADQRNFIFASSKNEKPQGNYSVIPPSSRDLASQKGNISETIVIDDEEDIETNGGAEKKSSCFIEWGLPGTKNKTNDLDFSTSSLSRSKTKTGVRPFNPGRMNVAGDLFQNGEFATHHSPDSWISQSASFPSNQKQPGVDSLSPVALLRKQNFQPTAQQQLTKPAKITCANCKKPLQKGQTAYQRKGSAHLFCSTTCLSSFSHKRTQNTRSIICKKDASTKKANVILPVESSKSFQEFYSTSCLSPCENNWNLKKGVFNKSRCTICSKLAEIRHEVSVNNVTHKLCSNHCFNKYRLANGLIMNCCEHCGEYMPSKSTGNNILVIGGQQKRFCCQSCINEYKQMMETKSKKLTASENRKRNAFREENEKQLYGSSNTLLKKIEGIPEKKEKTSQLQLSVECGTDTLLIQENVNLPPSSTSTIADTFQEQLEEKNFEDSIVPVVLSADPGTWPRILNIKQRDTLVENVPPQVRNFNFPKDNTGRKFSETYYTRILPNGEKTTRSWLLYSTSKDSVFCLYCKLFGEGKNQLKNENGCKDWQHLSHILSKHEESEMHVNNSVKYSKLKSDLKKNKAIDAAEHRLYENEKNDGVLLLYT

SEQ ID NO: 1056 - protein, 582 aa, Homo Sapiens
MAEFLDDQETRLCDNCKKEIPVFNFTIHEIHCQRNIGMCPTCKEPFPKSDMETHMAAEHCQVTCKCNKKLEKRLLKKHEETECPLRLAVCQHCDLELSILKLKEHEDYCGARTELCGNCGRNVLVKDLKTHPEVCGREGEEKRNEVAIPPNAYDESWGQDGIWIASQLLRQIEALDPPMRLPRRPLRAFESDVFHNRTTNQRNITAQVSIQNNLFEEQERQERNRGQQPPKEGGEESANLDFMLALSLQNEGQASSVAEQDFWRAVCEADQSHGGPRSLSDIKGAADEIMLPCEFCEELYPEELLIDHQTSCNPSRALPSLNTGSSSPRGVEEPDVIFQNFLQQAASNQLDSLMGLSNSHPVEESIIIPCEFCGVQLEEEVLFHHQDQCDQRPATATNHVTEGIPRLDSQPQETSPELPRRRVRHQGDLSSGYLDDTKQETANGPTSCLPPSRPINNMTATYNQLSRSTSGPRPGCQPSSPCVPKLSNSDSQDIQGRNRDSQNGAIAPGHVSVIRPPQNLYPENIVPSFSPGPSGRYGASGRSEGGRNSRVTPAAANYRSRTAKAKPSKQQGAGDAEEEEEE

SEQ ID NO: 1057 - protein, 305 aa, Homo Sapiens
MDLSGVKKKSLLGVKENNKKSSTRAPSPTKRKDRSDEKSKDRSKDKGATKESSEKDRGRDKTRKRRSASSGSSSTRSRSSSTSSSGSSTSTGSSSGSSSSSASSRSGSSSTSRSSSSSSSSGSPSPSRRRHDNRRRSRSKSKPPKRDEKERKRRSPSPKPTKVHIGRLTRNVTKDHIMEIFSTYGKIKMIDMPVERMHPHLSKGYAYVEFENPDEAEKALKHMDGGQIDGQEITATAVLAPWPRPPPRRFSPPRRMLPPPPMWRRSPPRMRRRSRSPRRRSPVRRRSRSPGRRRHRSRSSSNSSR

SEQ ID NO: 1058 - protein, 461 aa, Homo Sapiens
MSRQVVRSSKFRHVFGQPAKADQCYEDVRVSQTTWDSGFCAVNPKFVALICEASGGGAFLVLPLGKTGRVDKNAPTVCGHTAPVLDIAWCPHNDNVIASGSEDCTVMVWEIPDGGLMLPLREPVVTLEGHTKRVGIVAWHTTAQNVLLSAGCDNVIMVWDVGTGAAMLTLGPEVHPDTIYSVDWSRDGGLICTSCRDKRVRIIEPRKGTVVAEKDRPHEGTRPVRAVFVSEGKILTTGFSRMSERQVALWDTKHLEEPLSLQELDTSSGVLLPFFDPDTNIVYLCGKGDSSIRYFEITSEAPFLHYLSMFSSKESQRGMGYMPKRGLEVNKCEIARFYKLHERRCEPIAMTVPRKSDLFQEDLYPPTAGPDPALTAEEWLGGRDAGPLLISLKDGYVPPKSRELRVNRGLDTGRRRAAPEASGTPSSDAVSRLEEEMRKLQATVQELQKRLDRLEETVQAK

SEQ ID NO: 1059 - protein, 82 aa, Homo Sapiens
MAFTLYSLLQAALLCVNAIAVLHEERFLKNIGWGTDQGIGGFGEEPGIKSQLMNLIRSVRTVMRVPLIIVNSIAIVLLLLFG

SEQ ID NO: 1060 - protein, 701 aa, Homo Sapiens [sequence omitted]

SEQ ID NO: 1061 - protein, 563 aa, Homo Sapiens
MLEEAGEVLENMLKASCLPLGFIVFLPAVLLLVAPPLPAADAAHEFTVYRMQQYDLQGQPYGTRNAVLNTEARTMAAEVLSRRCVLMRLLDFSYEQYQKALRQSAGAVVIILPRAMAAVPQDVVRQFMEIEPEMLAMETAVPVYFAVEDEALLSIYKQTQAASASQGSASAAEVLLRTATANGFQMVTSGVQSKAVSDWLIASVEGRLTGLGGEDLPTIVIVAHYDAFGVAPWLSLGADSNGSGVSVLLELARLFSRLYTYKRTHAAYNLLFFASGGGKFNYQGTKRWLEDNLDHTDSSLLQDNVAFVLCLDTVGRGSSLHLHVSKPPREGTLQHAFLRELETVAAHQFPEVRFSMVHKRINLAEDVLAWEHERFAIRRLPAFTLSHLESHRDGQRSSIMDVRSRVDSKTLTRNTRIIAEALTRVIYNLTEKGTPPDMPVFTEQMQIQQEQLDSVMDWLTNQPRAAQLVDKDSTFLSTLEHHLSRYLKDVKQHHVKADKRDPEFVFYDQLKQVMNAYRVKPAVFDLLLAVGIAAYLGMAYVAVQHFSLLYKTVQRLLVKAKTQ

SEQ ID NO: 1062 - protein, 584 aa, Homo Sapiens
MKMMLVRRFRVLILMVFLVACALHIALDLLPRLERRGARPSGEPGCSCAQPAAEVAAPGWAQVRGRPGEPPAASSAAGDAGWPNKHTLRILQDFSSDPSSNLSSHSLEKLPPAAEPAERALRGRDPGALRPHDPAHRPLLRDPGPRRSESPPGPGGDASLLARLFEHPLYRVAVPPLTEEDVLFNVNSDTRLSPKAAENPDWPHAGAEGAEFLSPGEAAVDSYPNWLKFHIGINRYELYSRHNPAIEALLHDLSSQRITSVAMKSGGTQLKLIMTFQNYGQALFKPMKQTREQETPPDFFYFSDYERHNAEIAAFHLDRILDFRRVPPVAGRMVNMTKEIRDVTRDKKLWRTFFISPANNICFYGECSYYCSTEHALCGKPDQIEGSLAAFLPDLSLAKRKTWRNPWRRSYHKRKKAEWEVDPDYCEEVKQTPPYDSSHRILDVMDMTIFDFLMGNMDRHHYETFEKFGNETFIIHLDNGRGFGKYSHDELSILVPLQQCCRIRKSTYLRLQLLAKEEYKLSLLMAESLRGDQVAPVLYQPHLEALDRRLRVVLKAVRDCVERNGLHSVVDDDLDTEHRAASAR

SEQ ID NO: 1063 - protein, 631 aa, Homo Sapiens
MNSSDEEKQLQLITSLKEQAIGEYEDLRAENQKTKEKCDKIRQERDEAVKKLEEFQKISHMVIEEVNFMQNHLEIEKTCRESAEALATKLNKENKTLKRISMLYMAKLGPDVITEEINIDDEDSTTDTDGAAETCVSVQCQKQIKELRDQIVSVQEEKKILAIELENLKSKLVEVIEEVNKVKQEKTVLNSEVLEQRKVLEKCNRVSMLAVEEYEEMQVNLELEKDLRKKAESFAQEMFIEQNKLKRQSHLLLQSSIPDQQLLKALDENAKLTQQLEEERIQHQQKVKELEEQLENETLHKEIHNLKQQLELLEEDKKELELKYQNSEEKARNLKHSVDELQKRVNQSENSVPPPPPPPPPLPPPPPNPIRSLMSMIRKRSHPSGSGAKKEKATQPETTEEVTDLKRQAVEEMMDRIKKGVHLRPVNQTARPKTKPESSKGCESAVDELKGILGTLNKSTSSRSLKSLDPENSETELERILRRRKVTAEADSSSPTGILATSESKSMPVLGSVSSVTKTALNKKTLEAEFNSPSPPTPEPGEGPRKLEGCTSSKVTFQPPSSIGCRKKYIDGEKQAEPVVVLDPVSTHEPQTKDQVAEKDPTQHKEDEGEIQPENKEDSIENVRETDSSNC

SEQ ID NO: 1064 - protein, 911 aa, Homo Sapiens
MAQLFLPLLAALVLAQAPAALADVLEGDSSEDRAFRVRIAGDAPLQGVLGGALTIPCHVHYLRPPPSRRAVLGSPRVKWTFLSRGREAEVLVARGVRVKVNEAYRFRVALPAYPASLTDVSLALSELRPNDSGIYRCEVQHGIDDSSDAVEVKVKGVVFLYREGSARYAFSFSGAQEACARIGAHIATPEQLYAAYLGGYEQCDAGWLSDQTVRYPIQTPREACYGDMDGFPGVRNYGVVDPDDLYDVYCYAEDLNGELFLGDPPEKLTLEEARAYCQERGAEIATTGQLYAAWDGGLDHCSPGWLADGSVRYPIVTPSQRCGGGLPGVKTLFLFPNQTGFPNKHSRFNVYCFRDSAQPSAIPEASNPASNPASDGLEAIVTVTETLEELQLPQEATESESRGAIYSIPIMEDGGGGSSTPEDPAEAPRTLLEFETQSMVPPTGFSEEEGKALEEEEKYEDEEEKEEEEEEEEVEDEALWAWPSELSSPGPEASLPTEPAAQEESLSQAPARAVLQPGASPLPDGESEASRPPRVHGPPTETLPTPRERNLASPSPSTLVEAREVGEATGGPELSGVPRGESEETGSSEGAPSLLPATRAPEGTRELEAPSEDNSGRTAPAGTSVQAQPVLPTDSASRGGVAVVPASGDCVPSPCHNGGTCLEEEEGVRCLCLPGYGGDLCDVGLRFCNPGWDAFQGACYKHFSTRRSWEEAETQCRMYGAHLASISTPEEQDFINNRYREYQWIGLNDRTIEGDFLWSDGVPLLYENWNPGQPDSYFLSGENCVVMVWHDQGQWSDVPCNYHLSYTCKMGLVSCGPPPELPLAQVFGRPRLRYEVDTVLRYRCREGLAQRNLPLIRCQENGRWEAPQISCVPRRPARALHPEEDPEGRQGRLLGRWKALLIPPSSPMPGP

SEQ ID NO: 1065 - protein, 807 aa, Homo Sapiens
MKEWKSKMEISEEKKSARAASEKLQRQITQECELVETSNSEDRLLKHWVSPLKDAMRHLPSQESGIREMHIIPQKAIVGEIGHGCNEGEKILSAGESSHRYEVSGQNFKQKSGLTEHQKIHNINKTYECKECEKTFNRSSNLIIHQRIHTGNKPYVCNECGKDSNQSSNLIIHQRIHTGKKPYICHECGKDFNQSSNLVRHKQIHSGGNPYECKECGKAFKGSSNLVLHQRIHSRGKPYLCNKCGKAFSQSTDLIIHHRIHTGEKPYECYDCGQMFSQSSHLVPHQRIHTGEKPLKCNECEKAFRQHSHLTEHQRLHSGEKPYECHRCGKTFSGRTAFLKHQRLHAGEKIEECEKTFSKDEELREEQRIHQEEKAYWCNQCGRNFQGTSDLIRHQVTHTGEKPYECKECGKTFNQSSDLLRHHRIHSGEKPCVCSKCGKSFRGSSDLIRHHRVHTGEKPYECSECGKAFSQRSHLVTHQKIHTGEKPYQCTECGKAFRRRSLLIQHRRIHSGEKPYECKECGKLFIWRTAFLKHQSLHTGEKLECEKTFSQDEELRGEQKIHQEAKAYWCNQCGRAFQGSSDLIRHQVTHTREKPYECKECGKTFNQSSDLLRHHRIHSGEKPYVCNKCGKSFRGSSDLIKHHRIHTGEKPYECSECGKAFSQRSHLATHQKIHTGEKPYQCSECGNAFRRRSLLIQHRRLHSGEKPYECKECGKLFMWHTAFLKHQRLHAGEKLEECEKTFSKDEELRKEQRTHQEKKVYWCNQCSRTFQGSSDLIRHQVTHTREKPYECKECGKTQSELRPSETS

SEQ ID NO: 1066 - protein, 259 aa, Homo Sapiens
MRDRRGPLGTCLAQVQQAGGGDSDKLSCSLKKRMPEGPWPADAPSWMNKPVVDGNSQSEALSLEMRKDPSGAGLWLHSGGPVLPYVRESVRRNPASAATPSTAVGLFPAPTECFARVSCSGVEALGRRDWLGGGPRATDGHRGQCPKGEPRVSRLPRHQKVPEMGSFQDDPPSAFPKGLGSELEPACLHSILSATLHVYPEVLLSEETKRIFLDRLKPMFSKQTIEFKKMLKSTSDGLQITLGLLALQPFELANTLCHS

SEQ ID NO: 1067 - protein, 1119 aa, Homo Sapiens
MTAAAASNWGLITNIVNSIVGVSVLTMPFCFKQCGIVLGALLLVFCSWMTHQSCMFLVKSASLSKRRTYAGLAFHAYGKAGKMLVETSMIGLMLGTCIAFYVVIGDLGSNFFARLFGFQVGGTFRMFLLFAVSLCIVLPLSLQRNMMASIQSFSAMALLFYTVFMFVIVLSSLKHGLFSGQWLRRVSYVRWEGVFRCIPIFGMSFACQSQVLPTYDSLDEPSVKTMSSIFASSLNVVTTFYVMVGFFGYVSFTEATAGNVLMHFPSNLVTEMLRVGFMMSVAVGFPMMILPCRQALSTLLCEQQQKDGTFAAGGYMPPLRFKALTLSVVFGTMVGGILIPNVETILGLTGATMGSLICFICPALIYKKIHKNALSSQVVLWVGLGVLVVSTVTTLSVSEEVPEDLAEEAPGGRLGEAEGLMKVEAARLSAQDPVVAVAEDGREKPKLPKEREELEQAQIKGPVDVPGREDGKEAPEEAQLDRPGQGIAVPVGEAHRHEPPVPHDKVVVDEGQDREVPEENKPPSRHAGGKAPGVQGQMAPPLPDSEREKQEPEQGEVGKRPGQAQALEEAGDLPEDPQKVPEADGQPAVQPAKEDLGPGDRGLHPRPQAVLSEQQNGLAVGGGEKAKGGPPPGNAAGDTGQPAEDSDHGGKPPLPAEKPAPGPGLPPEPREQRDVERAGGNQAASQLEEAGRAEMLDHAVLLQVIKEQQVQQKRLLDQQEKLLAVIEEQHKEIHQQRQEDEEDKPRQVEVHQEPGAAVPRGQEAPEGKARETVENLPPLPLDPVLRAPGGRPAPSQDLNQRSLEHSEGPVGRDPAGPPDGGPDTEPRAAQAKLRDGQKDAAPRAAGTVKELPKGPEQVPVPDPAREAGGPEERLAEEFPGQSQDVTGGSQDRKKPGKEVAATGTSILKEANWLVAGPGAETGDPRMKPKQVSRDLGLAADLPGGAEGAAAQPQAVLRQPELRVISDGEQGGQQGHRLDHGGHLEMRKARGGDHVPVSHEQPRGGEDAAVQEPRQRPEPELGLKRAVPGGQRPDNAKPNRDLKLQAGSDLRRRRRDLGPHAEGQLAPRDGVIIGLNPLPDVQVNDLRGALDAQLRQAAGGALQVVHSRQLRQAPGPPEES

SEQ ID NO: 1068 - protein, 826 aa, Homo Sapiens
MPPASGPSVLARLLPLLGLLLGSASRAPGKSPPEPPSPQEILIKVQVYVSGELVPLARASVDVFGNRTLLAAGTTDSEGVATLPLSYRLGTWVLVTAARPGFLTNSVPWRVDKLPLYASVSLYLLPERPATLILYEDLVHILLGSPGARSQPLVQFQRRAARLPVSSTYSQLWASLTPASTQQEMRAFPAFLGTEASSSGNGSWLELMPLTAVSVHLLTGNGTEVPLSGPIHLSLPVPSETRALTVGTSIPAWRFDPKSGLWVRNGTGVIRKEGRQLYWTFVSPQLGYWVAAMASPTAGLVTITSGIQDIGTYHTIFLLTILAALALLVLILLCLLIYYCRRRCLKPRQQHRKLQLSGPSDGNKRDQATSMSQLHLICGGPLEPAPSGDPEAPPPGPLHSAFSSSRDLASSRDDFFRTKPRSASRPAAEPSGARGGESAGLKGARSAEGPGGLEPGLEEHRRGPSGAAAFLHEPPSPPPPFDHYLGHKGAAEGKTPDFLLSQSVDQLARPPSLGQAGQLIFCGSIDHLKDNVYRNVMPTLVIPAHYVRLGGEAGAAGVGDEPAPPEGTAPGPARAFPQPDPQRPQMPGHSGPGGEGGGGGGEGWGAGRAAPVSGSVTIPVLFNESTMAQLNGELQALTEKKLLELGVKPHPRAWFVSLDGRSNSQVRHSYIDLQAGGGARSTDASLDSGVDVHEARPARRRPAREERERAPPAAPPPPPAPPRLALSEDTEPSSSESRTGLCSPEDNSLTPLLDEVAAPEGRAATVPRGRGRSRGDSSRSSASELRRDSLTSPEDELGAEVGDEAGDKKSPWQRREERPLMVFNVK

SEQ ID NO: 1069 - protein, 2617 aa, Homo Sapiens
MLTDSGGGGTSFEEDLDSVAPRSAPAGASEPPPPGGVGLGIRTVRLFGEAGPASGVGSSGGGGSGSGTGGGDAALDFKLAAAVLRTGGGGGASGSDEDEVSEVESFILDQEDLDNPVLKTTSEIFLSSTAEGADLRTVDPETQARLEALLEAAGIGKLSTADGKAFADPEVLRRLTSSVSCALDEAAAALTRMKAENSHNAGQVDTRSLAEACSDGDVNAVRKLLDEGRSVNEHTEEGESLLCLACSAGYYELAQVLLAMHANVEDRGNKGDITPLMAASSGGYLDIVKLLLLHDADVNSQSATGNTALTYACAGGFVDIVKVLLNEGANIEDHNENGHTPLMEAASAGHVEVARVLLDHGAGINTHSNEFKESALTLACYKGHLDMVRFLLEAGADQEHKTDEMHTALMEACMDGHVEVARLLLDSGAQVNMPADSFESPLTLAACGGHVELAALLIERGANLEEVNDEGYTPLMEAAREGHEEMVALLLAQGANINAQTEETQETALTLACCGGFSEVADFLIKAGADIELGCSTPLMEASQEGHLELVKYLLASGANVHATTATGDTALTYACENGHTDVADVLLQAGADLEHESEGGRTPLMKAARAGHLCTVQFLISKGANVNRATANNDHTVVSLACAGGHLAVVELLLAHGADPTHRLKDGSTMLIEAAKGGHTNVVSYLLDYPNNVLSVPTTDVSQLPPPSQDQSQVPRVPTHTLAMVVPPQEPDRTSQENSPALLGVQKGTSKQKSSSLQVADQDLLPSFHPYQPLECIVEETEGKLNELGQRISAIEKAQLKSLELIQGEPLNKDKIEELKKNREEQVQKKKKILKELQKVERQLQMKTQQQFTKEYLETKGQKDTVSLHQQCSHRGVFPEGEGDGSLPEDHFSELPQVDTILFKDNDVDDEQQSPPSAEQIDFVPVQPLSSPQCNFSSDLGSNGTNSLELQKVSGNQQIVGQPQIAITGHDQGLLVQEPDGLMVATPAQTLTDTLDDLIAAVSTRVPTGSNSSSQTTECLTPESCSQTTSNVASQSMPPVYPSVDIDAHTESNHDTALTLACAGGHEELVSVLIARDAKIEHRDKKGFTPLILAATAGHVGVVEILLDKGGDIEAQSERTKDTPLSLACSGGRQEVVDLLLARGANKEHRNVSDYTPLSLAASGGYVNIIKILLNAGAEINSRTGSKLGISPLMLAAMNGHVPAVKLLLDMGSDINAQIETNRNTALTLACFQGRAEVVSLLLDRKANVEHRAKTGLTPLMEAASGGYAEVGRVLLDKGADVNAPPVPSSRDTALTIAADKGHYKFCELLIHRGAHIDVRNKKGNTPLWLASNGGHFDVVQLLVQAGADVDAADNRKITPLMSAFRKGHVKVVQYLVKEVNQFPSDIECMRYIATITDKELLKKCHQCVETIVKAKDQQAAEANKNASILLKELDLEKSREESRKQALAAKREKRKEKRKKKKEEQKRKQEEDEENKPKENSELPEDEDEEENDEDVEQEVPIEPPSATTTTTIGISATSATFTNVFGKKRANVVTTPSTNRKNKKNKTKETPPTAHLILPEQHMSLAQQKADKNKINGEPRGGGAGGNSDSDNLDSTDCNSESSSGGKSQELNFVMDVNSSKYPSLLLHSQEEKTSTATSKTQTRLEGEVTPNSLSTSYKTVSLPLSSPNIKLNLTSPKRGQKREEGWKEVVRRSKKLSVPASVVSRIMGRGGCNITAIQDVTGAHIDVDKQKDKNGERMITIRGGTESTRYAVQLINALIQDPAKELEDLIPKNHIRTPASTKSIHANFSSGVGTTAASSKNAFPLGAPTLVTSQATTLSTFQPANKLNKNVPTNVRSSFPVSLPLAYPHPHFALLAAQTMQQIRHPRLPMAQFGGTFSPSPNTWGPFPVRPVNPGNTNSSPKHNNTSRLPNQNGTVLPSESAGLATASCPITVSSVVAASQQLCVTNTRTPSSVRKQLFACVPKTSPPATVISSVTSTCSSLPSVSSAPITSGQAPTTFLPASTSQAQLSSQKMESFSAVPPTKEKVSTQDQPMANLCTPSSTANSCSSSASNTPGAPETHPSSSPTPTSSNTQEEAQPSSVSDLSPMSMPFASNSEPAPLTLTSPRMVAADNQDTSNLPQLAVPAPRVSHRMQPRGSFYSMVPNATIHQDPQSIFVTNPVTLTPPQGPPAAVQLSSAVNIMNGSQMHINPANKSLPPTFGPATLFNHFSSLFDSSQVPANQGWGDGPLSSRVATDASFTVQSAFLGNSVLGHLENMHPDNSKAPGFRPPSQRVSTSPVGLPSIDPSGSSPSSSSAPLASFSGIPGTRVFLQGPAPVGTPSFNRQHFSPHPWTSASNSSTSAPPTLGQPKGVSASQDRKIPPPIGTERLARIRQGGSVAQAPAGTSFVAPVGHSGIWSFGVNAVSEGLSGWSQSVMGNHPMHQQLSDPSTFSQHQPMERDDSGMVAPSNIFHQPMASGFVDFSKGLPISMYGGTIIPSHPQLADVPGGPLFNGLHNPDPAWNPMIKVIQNSTECTDAQQASLLPSVPALKGEIPSPQLTRPKKRIGRPMVASPNQRHQDHLRPKVPAGVQELTHCPDTPLLPPSDSRGHNSSNSPSLQAGGAEGAGDRGRDTR

SEQ ID NO: 1070 - protein, 691 aa, Homo Sapiens
MGQALGIKSCDFQAARNNEEHHTKALSSRRLFVRRGQPFTIILYFRAPVRAFLPALKKVALTAQTGEQPSKINRTQATFPISSLGDRKWWSAVVEERDAQSWTISVTTPADAVIGHYSLLLQVSGRKQLLLGQFTLLFNPWNREDAVFLKNEAQRMEYLLNQNGLIYLGTADCIQAESWDFGQFEGDVIDLSLRLLSKDKQVEKWSQPVHVARVLGALLHFLKEQRVLPTPQTQATQEGALLNKRRGSVPILRQWLTGRGRPVYDGQAWVLAAVACTVLRCLGIPARVVTTFASAQGTGGRLLIDEYYNEEGLQNGEGQRGRIWIFQTSTECWMTRPALPQGYDGWQILHPSAPNGGGVLGSCDLVPVRAVKEGTLGLTPAVSDLFAAINASCVVWKCCEDGTLELTDSNTKYVGNNISTKGVGSDRCEDITQNYKYPEGSLQEKEVLERVEKEKMEREKDNGIRPPSLETASPLYLLLKAPSSLPLRGDAQISVTLVNHSEQEKAVQLAIGVQAVHYNGVLAAKLWRKKLHLTLSANLEKIITIGLFFSNFERNPPENTFLRLTAMATHSESNLSCFAQEDIAICRPHLAIKMPEKAEQYQPLTASVSLQNSLDAPMEDCVISILGRGLIHRERSYRFRSVWPENTMCAKFQFTPTHVGLQRLTVEVDCNMFQNLTNYKSVTVVAPELSA

SEQ ID NO: 1071 - protein, 589 aa, Homo Sapiens
MELENIVANTVLLKAREGGGGNRKGKSKKWRQMLQFPHISQCEELRLSLERDYHSLCERQPIGRLLFREFCATRPELSRCVAFLDGVAEYEVTPDDKRKACGRQLTQNFLSHTGPDLIPEVPRQLVTNCTQRLEQGPCKDLFQELTRLTHEYLSVAPFADYLDSIYFNRFLQWKWLERQPVTKNTFRQYRVLGKGGFGEVCACQVRATGKMYACKKLEKKRIKKRKGEAMALNEKQILEKVNSRFVVSLAYAYETKDALCLVLTLMNGGDLKFHIYHMGQAGFPEARAVFYAAEICCGLEDLHRERIVYRDLKPENILLDDHGHIRISDLGLAVHVPEGQTIKGRVGTVGYMAPEVVKNERYTFSPDWWALGCLLYEMIAGQSPFQQRKKKIKREEVERLVKEVPEEYSERFSPQARSLCSQLLCKDPAERLGCRGGSAREVKEHPLFKKLNFKRLGAGMLEPPFKPDPQAIYCKDVLDIEQFSTVKGVELEPTDQDFYQKFATGSVPIPWQNEMVETECFQELNVFGLDGSVPPDLDWKGQPPAPPKKGLLQRLFSRQRIAVETAATARKSSPPASSPQPEAPTSSWR

SEQ ID NO: 1072 - protein, 226 aa, Homo Sapiens
  misc_feature (73)..(73): Xaa can be any naturally occurring amino acid
MARLLQASCLLSLLLAGFVSQSRGQEKSKMDCHGGISGTIYEYGALTIDGEEYIPFKQYAGKYVLFVNVASYXGLTGQYIELNALQEELAPFGLVILGFPCNQFGKQEPGENSEILPTLKYVRPGGGFVPNFQLFEKGDVNGEKEQKFYTFLKNSCPPTSELLGTSDRLFWEPMKVHDIRWNFEKFLVGPDGIPIMRWHHRTTVSNVKMDILSYMRRQAALGVKRK

SEQ ID NO: 1073 - protein, 463 aa, Homo Sapiens
MAALRALCGFRGVAAQVLRPGAGVRLPIQPSRGVRQWQPDVEWAQQFGGAVMYPSKETAHWKPPPWNDVDPPKDTIVKNITLNFGPQHPAAHGVLRLVMELSGEMVRKCDPHIGLLHRGTEKLIEYKTYLQALPYFDRLDYVSMMCNEQAYSLAVEKLLNIRPPPRAQWIRVLFGEITRLLNHIMAVTTHALDLGAMTPFFWLFEEREKMFEFYERVSGARMHAAYIRPGGVHQDLPLGLMDDIYQFSKNFSLRLDELEELLTNNRIWRNRTIDIGVVTAEEALNYGFSGVMLRGSGIQWDLRKTQPYDVYDQVEFDVPVGSRGDCYDRYLCRVEEMRQSLRIIAQCLNKMPPGEIKVDDAKVSPPKRAEMKTSMESLIHHFKLYTEGYQVPPGATYTAIEAPKGEFGVYLVSDGSSRPYRCKIKAPGFAHLAGLDKMSKGHMLADVVAIIGTQDIVFGEVDR

SEQ ID NO: 1074 - protein, 239 aa, Homo Sapiens
MAATLLAARGAGPAPAWGPEAFTPDWESREVSTGTTIMAVQFDGGVVLGADSRTTTGSYIANRVTDKLTPIHDRIFCCRSGSAADTQAVADAVTYQLGFHSIELNEPPLVHTAASLFKEMCYRYREDLMAGIIIAGWDPQEGGQVYSVPMGGMMVRQSFAIGGSGSSYIYGYVDATYREGMTKEECLQFTANALALAMERDGSSGGVIRLAAIAESGVERQVLLGDQIPKFAVATLPPA

SEQ ID NO: 1075 - protein, 155 aa, Homo Sapiens
MASLKCSTVVCVICLEKPKYRCPACRVPYCSVVCFRKHKEQCNPETRPVEKKIRSALPTKTVKPVENKDDDDSIADFLNSDEEEDRVSLQNLKNLGESATLRSLLLNPHLRQLMVNLDQGEDKAKLMRAYMQEPLFVEFADCCLGIVEPSQNEES

SEQ ID NO: 1076 - protein, 289 aa, Homo Sapiens
MVGVKPVGSDPDFQPELSGAGSRLAVVKFTMRGCGPCLRIAPAFSSMSNKYPQAVFLEVDVHQCQGTAATNNISATPTFLFFRNKVRIDQYQGADAVGLEEKIKQHLENDPGSNEDTDIPKGYMDLMPFINKAGCECLNESDEHGFDNCLRKDTTFLESDCDEQLLITVAFNQPVKLYSMKFQGPDNGQGPKYVKIFINLPRSMDFEEAERSEPTQALELTEDDIKEDGIVPLRYVKFQNVNSVTIFVQSNQGEEETTRISYFTFIGTPVQATNMNDFKRVVGKKGESH

SEQ ID NO: 1077 - protein, 146 aa, Homo Sapiens
MLAGAGRPGLPQGRHLCWLLCAFTLKLCQAEAPVQEEKLSASTSNLPCWLVEEFVVAEECSPCSNFRAKTTPECGPTGYVEKITCSSSKRNEFKSCRSALMEQRLFWKFEGAVVCVALIFACLVIIRQRQLDRKALEKVRKQIESI

SEQ ID NO: 1078 - protein, 235 aa, Homo Sapiens
MRWAAPGKKTSGLQQKNIEVKTKKNKQKTPGNGDGGSTSETPQPPRKKRAQVDPTVENEETFMNRVEVKVKIPEELKPWLVDDWDLITRQKQLFYLPAEKNVDSILEDYANYKKSHGNTDNKEYAVNEVVAGIKEYFNLMLGTQLLNKFERPQYAEILADCPDAPMSQVYGVPHLLRLSVQIGAMLAYTPLNEKSLALLLNYLHDFLKYLAKNSATLFSASDYEVALPEYHRKAV

SEQ ID NO: 1079 - protein, 407 aa, Homo Sapiens
MTTSGALFPSLVPGSRGASNKYLVEFRAGKMSLKGTTVTPDKRKGLVYIQQTDDSLIHFCWKDRTSGNVEDDLIIFPDDCEFKRVPQCPSGRVYVLKFKAGSKRLFFWMQEPKTDQDEEHCRKVNEYLNNPPMPGALGASGSSGHELSALGGEGGLQSLLGNMSHSQLMQLIGPAGLGGLGGLGALTGPGLASLLGSSGPPGSSSSSSSRSQSAAVTPSSTTSSTRATPAPSAPAAASATSPSPAPSSGNGASTAASPTQPIQLSDLQSILATMNVPAGPAGGQQVDLASVLTPEIMAPILANADVQERLLPYLPSGESLPQTADEIQNTLTSPQFQQALGMFSAALASGQLGPLMCQFGLPAEAVEAANKGDVEAFAKAMQNNAKPEQKEGDTKDKKDEEEDMSLD

SEQ ID NO: 1080 - protein, 5430 aa, Homo Sapiens
MSSSDEETLSERSCRSERSCRSERSYRSERSGSLSPCPPGDTLPWNLPLHEQKKRKSQDSVLDPAERAVVRVADERDRVQKKTFTKWVNKHLMKVRKHINDLYEDLRDGHNLISLLEVLSGIKLPREKGRMRFHRLQNVQIALDFLKQRQVKLVNIRNDDITDGNPKLTLGLIWTIILHFQISDIYISGESGDMSAKEKLLLWTQKVTAGYTGIKCTNFSSCWSDGKMFNALIHRYRPDLVDMERVQIQSNRENLEQAFEVAERLGVTRLLDAEDVDVPSPDEKSVITYVSSIYDAFPKVPEGGEGISATEVDSRWQEYQSRVDSLIPWIKQHTILMSDKTFPQNPVELKALYNQYIHFKETEILAKEREKGRIEELYKLLEVWIEFGRIKLPQGYHPNDVEEEWGKLIIEMLEREKSLRPAVERLELLLQIANKIQNGALNCEEKLTLAKNTLQADAAHLESGQPVQCESDVIMYIQECEGLIRQLQVDLQILRDENYYQLEELAFRVMRLQDELVTLRLECTNLYRKGHFTSLELVPPSTLTTTHLKAEPLTKATHSSSTSWFRKPMTRAELVAISSSEDEGNLRFVYELLSWVEEMQMKLERAEWGNDLPSVELQLETQQHIHTSVEELGSSVKEARLYEGKMSQNFHTSYAETLGKLETQYCKLKETSSFRMRHLQSLHKFVSRATAELIWLNEKEEEELAYDWSDNNSNISAKRNYFSELTMELEEKQDVFRSLQDTAELLSLENHPAKQTVEAYSAAVQSQLQWMKQLCLCVEQHVKENTAYFQFFSDARELESFLRNLQDSIKRKYSCDHNTSLSRLEDLLQDSMDEKEQLIQSKSSVASLVGRSKTIVQLKPRSPDHVLKNTISVKAVCDYRQIEITICKNDECVLEDNSQRTKWKVISPTGNEAMVPSVCFLIPPPNKDAIEMASRVEQSYQKVMALWHQLHVNTKSLISWNYLRKDLDLVQTWNLEKLRSSAPGECHQIMKNLQAHYEDFLQDSRDSVLFSVADRLRLEEEVEACKARFQHLMKSMENEDKEETVAKMYISELKNIRLRLEEYEQRVVKRIQSLASSRTDRDAWQDNALRIAEQEHTQEDLQQLRSDLDAVSMKCDSFLHQSPSSSSVPTLRSELNLLVEKMDHVYGLSTVYLNKLKTVDVIVRSIQDAELLVKGYEIKLSQEEVVLADLSALEAHWSTLRHWLSDVKDKNSVFSVLDEEIAKAKVVAEQMSRLTPERNLDLERYQEKGSQLQERWHRVIAQLEIRQSELESIQEVLGDYRACHGTLIKWIEETTAQQEMMKPGQAEDSRVLSEQLSQQTALFAEIERNQTKLDQCQKFSQQYSTIVKDYELQLMTYKAFVESQQKSPGKRRRMLSSSDAITQEFMDLRTRYTALVTLTTQHVKYISDALRRLEEEEKVVEEEKQEHVEKVKELLGWVSTLARNTQGKATSSETKESTDIEKAILEQQVLSEELTTKKEQVSEAIKTSQIFLAKHGHKLSEKEKKQISEQLNALNKAYHDLCDGSANQLQQLQSQLAHQTEQKTLQKQQNTCHQQLEDLCSWVGQAERALAGHQGRTTQQDLSALQKNQSDLKDLQDDIQNRATSFATVVKDIEGFMEENQTKLSPRELTALREKLHQAKEQYEALQEETRVAQKELEEAVTSALQQETEKSKAAKELAENKKKIDALLDWVTSVGSSGGQLLTNLPGMEQLSGASLEKGALDTTDGYMGVNQAPEKLDKQCEMMKARHQELLSQQQNFILATQSAQAFLDQHGHNLTPEEQQMLQQKLGELKEQYSTSLAQSEAELKQVQTLQDELQKFLQDHKEFESWLERSEKELENMHKGGSSPETLPSLLKRQGSFSEDVISHKGDLRFVTISGQKVLDMENSFKEGKEPSEIGNLVKDKLKDATERYTALHSKCTRLGSHLNMLLGQYHQFQNSADSLQAWMQACEANVEKLLSDTVASDPGVLQEQLATTKQLQEELAEHQVPVEKLQKVARDIMEIEGEPAPDHRHVQETTDSILSHFQSLSYSLAERSSLLQKAIAQSQSVQESLESLLQSIGEVEQNLEGKQVSSLSSGVIQEALATNMKLKQDIARQKSSLEATREMVTRFMETADSTTAAVLQGKLAEVSQRFEQLCLQQQEKESSLKKLLPQAEMFEHLSGKLQQFMENKSRMLASGNQPDQDITHFFQQIQELNLEMEDQQENLDTLEHLVTELSSCGFALDLCQHQDRVQNLRKDFTELQKTVKEREKDASSCQEQLDEFRKLVRTFQKWLKETEGSIPPTETSMSAKELEKQIEHLKSLLDDWASKGTLVEEINCKGTSLENLIMEITAPDSQGKTGSILPSVGSSVGSVNGYHTCKDLTEIQCDMSDVNLKYEKLGGVLHERQESLQAILNRMEEVHKEANSVLQWLESKEEVLKSMDAMSSPTKTETVKAQAESNKAFLAELEQNSPKIQKVKEALAGLLVTYPNSQEAENWKKIQEELNSRWERATEVTVARQRQLEESASHLACFQAAESQLRPWLMEKELMMGVLGPLSIDPNMLNAQKQQVQFMLKEFEARRQQHEQLNEAAQGILTGPGDVSLSTSQVQKELQSINQKWVELTDKLNSRSSQIDQAIVKSTQYQELLQDLSEKVRAVGQRLSVQSAISTQPEAVKQQLEETSEIRSDLEQLDHEVKEAQTLCDELSVLIGEQYLKDELKKRLETVALPLQGLEDLAADRINRLQAALASTQQFQQMFDELRTWLDDKQSQQAKNCPISAKLERLQSQLQENEEFQKSLNQHSGSYEVIVAEGESLLLSVPPGEEKRTLQNQLVELKNHWEELSKKTADRQSRLKDCMQKAQKYQWHVEDLVPWIEDCKAKMSELRVTLDPVQLESSLLRSKAMLNEVEKRRSLLEILNSAADILINSSEADEDGIRDEKAGINQNMDAVTEELQAKTGSLEEMTQRLREFQESFKNIEKKVEGAKHQLEIFDALGSQACSNKNLEKLRAQQEVLQALEPQVDYLRNFTQGLVEDAPDGSDASQLLHQAEVAQQEFLEVKQRVNSGCVMMENKLEGIGQFHCRVREMFSQLADLDDELDGMGAIGRDTDSLQSQIEDVRLFLNKIHVLKLDIEASEAECRHMLEEEGTLDLLGLKRELEALNKQCGKLTERGKARQEQLELTLGRVEDFYRKLKGLNDATTAAEEAEALQWVVGTEVEIINQQLADFKMFQKEQVDPLQMKLQQVNGLGQGLIQSAGKDCDVQGLEHDMEEINARWNTLNKKVAQRIAQLQEALLHCGKFQDALEPLLSWLADTEELIANQKPPSAEYKVVKAQIQEQKLLQRLLDDRKATVDMLQAEGGRIAQSAELADREKITGQLESLESRWTELLSKAAARQKQLEDILVLAKQFHETAEPISDFLSVTEKKLANSEPVGTQTAKIQQQIIRHKALEEDIENHATDVHQAVKIGQSLSSLTSPAEQGVLSEKIDSLQARYSEIQDRCCRKAALLDQALSNARLFGEDEVEVLNWLAEVEDKLSSVFVKDFKQDVLHRQHADHLALNEEIVNRKKNVDQAIKNGQALLKQTTGEEVLLIQEKLDGIKTRYADITVTSSKALRTLEQARQLATKFQSTYEELTGWLREVEEELATSGGQSPTGEQIPQFQQRQKELKKEVMEHRLVLDTVNEVSRALLELVPWRAREGLDKLVSDANEQYKLVSDTIGQRVDEIDAAIQRSQQYEQAADAELAWVAETKRKLMALGPIRLEQDQTTAQLQVQKAFSIDIIRHKDSMDELFSHRSEIFGTCGEEQKTVLQEKTESLIQQYEAISLLNSERYARLERAQVLVNQFWETYEELSPWIEETRALIAQLPSPAIDHEQLRQQQEEMRQLRESIAEHKPHIDKLLKIGPQLKELNPEEGEMVEEKYQKAENMYAQIKEEVRQRALALDEAVSQSTQITEFHDKIEPMLETLENLSSRLRMPPLIPAEVDKIRECISDNKSATVELEKLQPSFEALKRRGEELIGRSQGADKDLAAKEIQDKLDQMVFFWEDIKARAEEREIKFLDVLELAEKFWYDMAALLTTIKDTQDIVHDLESPGIDPSIIKQQVEAAETIKEETDGLHEELEFIRILGADLIFACGETEKPEVRKSIDEMNNAWENLNKTWKERLEKLEDAMQAAVQYQDTLQAMFDWLDNTVIKLCTMPPVGTDLNTVKDQLNEMKEFKVEVYQQQIEMEKLNHQGELMLKKATDETDRDIIREPLTELKHLWENLGEKIAHRQHKLEGALLALGQFQHALEELMSWLTHTEELLDAQRPISGDPKVIEVELAKHHVLKNDVLAHQATVETVNKAGNELLESSAGDDASSLRSRLEAMNQCWESVLQKTEEREQQLQSTLQQAQGFHSEIEDFLLELTRMESQLSASKPTGGLPETAREQLDTHMELYSQLKAKEETYNQLLDKGRLMLLSRDDSGSGSKTEQSVALLEQKWHVVSSKMEERKSKLEEALNLATEFQNSLQEFINWLTLAEQSLNIASPPSLILNTVLSQIEEHKVFANEVNAHRDQIIELDQTGNQLKFLSQKQDVVLIKNLLVSVQSRWEKVVQRSIERGRSLDDARKRAKQFHEAWKKLIDWLEDAESHLDSELEISNDPDKIKLQLSKHKEFQKTLGGKQPVYDTTIRTGRALKEKTLLPEDSQKLDNFLGEVRDKWDTVCGKSVERQHKLEEALLFSGQFMDALQALVDWLYKVEPQLAEDQPVHGDLDLVMNLMDAHKVFQKELGKRTGTVQVLKRSGRELIENSRDDTTWVKGQLQELSTRWDTVCKLSVSKQSRLEQALKQAEVFRDTVHMLLEWLSEAEQTLRFRGALPDDTEALQSLIDTHKEFMKKVEEKRVDVNSAVAMGEVILAVCHPDCITTIKHWITIIRARFEEVLTWAKQHQQRLETALSELVANAELLEELLAWIQWAETTLIQRDQEPIPQNIDRVKALIAEHQTFMEEMTRKQPDVDRVTKTYKRKNIEPTHAPFIEKSRSGGRKSLSQPTPPPMPILSQSEAKNPRINQLSARWQQVWLLALERQRKLNDALDRLEELKEFANFDFDVWRKKYMRWMNHKKSRVMDFFRRIDKDQDGKITRQEFIDGILASKFPTTKLEMTAVADIFDRDGDGYIDYYEFVAALHPNKDAYRPTTDADKIEDEVTRQVAQCKCAKRFQVEQIGENKYRFGDSQQLRLVRILRSTVMVRVGGGWMALDEFLVKNDPCRARGRTNIELREKFILPEGASQGMTPFRSRGRRSKPSSRAASPTRSSSSASQSNHSCTSMPSSPATPASGTKVIPSSGSKLKRPTPTFHSSRTSLAGDTSNSSSPASTGAKTNRADPKKSASRPGSRAGSRAGSRASSRRGSDASDFDLLETQSACSDTSESSAAGGQGNSRRGLNKPSKIPTMSKKTTTASPRTPGPKR

SEQ ID NO: 1081 - protein, 375 aa, Homo Sapiens
MMCQSEARQGPELRAAKWLHFPQLALRRRLGQLSCMSRPALKLRSWPLTVLYYLLPFGALRPLSRVGWRPVSRVALYKSVPTRLLSRAWGRLNQVELPHWLRRPVYSLYIWTFGVNMKEAAVEDLHHYRNLSEFFRRKLKPQARPVCGLHSVISPSDGRILNFGQVKNCEVEQVKGVTYSLESFLGPRMCTEDLPFPPAASCDSFKNQLVTREGNELYHCVIYLAPGDYHCFHSPTDWTVSHRRHFPGSLMSVNPGMARWIKELFCHNERVVLTGDWKHGFFSLTAVGATNVGSIRIYFDRDLHTNSPRHSKGSYNDFSFVTHTNREGVPMRKGEHLGEFNLGSTIVLIFEAPKDFNFQLKTGQKIRFGEALGSL

SEQ ID NO: 1082 - protein, 584 aa, Homo Sapiens
MASVQASRRQWCYLCDLPKMPWAMVWDFSEAVCRGCVNFEGADRIELLIDAARQLKRSHVLPEGRSPGPPALKHPATKDLAAAAAQGPQLPPPQAQPQPSGTGGGVSGQDRYDRATSSGRLPLPSPALEYTLGSRLANGLGREEAVAEGARRALLGSMPGLMPPGLLAAAVSGLGSRGLTLAPGLSPARPLFGSDFEKEKQQRNADCLAELNEAMRGRAEEWHGRPKAVREQLLALSACAPFNVRFKKDHGLVGRVFAFDATARPPGYEFELKLFTEYPCGSGNVYAGVLAVARQMFHDALREPGKALASSGFKYLEYERRHGSGEWRQLGELLTDGVRSFREPAPAEALPQQYPEPAPAALCGPPPRAPSRNLAPTPRRRKASPEPEGEAAGKMTTEEQQQRHWVAPGGPYSAETPGVPSPIAALKNVAEALGHSPKDPGGGGGPVRAGGASPAASSTAQPPTQHRLVARNGEAEVSPTAGAEAVSGGGSGTGATPGAPLCCTLCRERLEDTHFVQCPSVPGHKFCFPCSREFIKAQGPAGEVYCPSGDKCPLVGSSVPWAFMQGEIATILAGDIKVKKERDP

SEQ ID NO: 1083 - protein, 793 aa, Homo Sapiens
MWIQVRTMDGRQTHTVDSLSRLTKVEELRRKIQELFHVEPGLQRLFYRGKQMEDGHTLFDYEVRLNDTIQLLVRQSLVLPHSTKERDSELSDTDSGCCLGQSESDKSSTHGEAAAETDSRPADEDMWDETELGLYKVNEYVDARDTNMGAWFEAQVVRVTRKAPSRDEPCSSTSRPALEEDVIYHVKYDDYPENGVVQMNSRDVRARARTIIKWQDLEVGQVVMLNYNPDNPKERGFWYDAEISRKRETRTARELYANVVLGDDSLNDCRIIFVDEVFKIERPGEGSPMVDNPMRRKSGPSCKHCKDDVNRLCRVCACHLCGGRQDPDKQLMCDECDMAFHIYCLDPPLSSVPSEDEWYCPECRNDASEVVLAGERLRESKKKAKMASATSSSQRDWGKGMACVGRTKECTIVPSNHYGPIPGIPVGTMWRFRVQVSESGVHRPHVAGIHGRSNDGAYSLVLAGGYEDDVDHGNFFTYTGSGGRDLSGNKRTAEQSCDQKLTNTNRALALNCFAPINDQEGAEAKDWRSGKPVRVVRNVKGGKNSKYAPAEGNRYDGIYKVVKYWPEKGKSGFLVWRYLLRRDDDEPGPWTKEGKDRIKKLGLTMQYPEGYLEALANREREKENSKREEEEQQEGGFASPRTGKGKWKRKSAGGGPSRAGSPRRTSKKTKVEPYSLTAQQSSLIREDKSNAKLWNEVLASLKDRPASGSPFQLFLSKVEETFQCICCQELVFRPITTVCQHNVCKDCLDRSFRAQVFSCPACRYDLGRSYAMQVNQPLQTVLNQLFPGYGNGR

SEQ ID NO: 1084 - protein, 1443 aa, Homo Sapiens
MYAVYKQAHPPTGLEFSMYCNFFNNSERNLVVAGTSQLYVYRLNRDAEALTKNDRSTEGKAHREKLELAASFSFFGNVMSMASVQLAGAKRDALLLSFKDAKLSVVEYDPGTHDLKTLSLHYFEEPELRDGFVQNVHTPRVRVDPDGRCAAMLVYGTRLVVLPFRRESLAEEHEGLVGEGQRSSFLPSYIIDVRALDEKLLNIIDLQFLHGYYEPTLLILFEPNQTWPGRVAVRQDTCSIVAISLNITQKVHPVIWSLTSLPFDCTQALAVPKPIGGVVVFAVNSLLYLNQSVPPYGVALNSLTTGTTAFPLRTQEGVRITLDCAQATFISYDKMVISLKGGEIYVLTLITDGMRSVRAFHFDKAAASVLTTSMVTMEPGYLFLGSRLGNSLLLKYTEKLQEPPASAVREAADKEEPPSKKKRVDATAGWSAAGKSVPQDEVDEIEVYGSEAQSGTQLATYSFEVCDSILNIGPCANAAVGEPAFLSEEFQNSPEPDLEIVVCSGHGKNGALSVLQKSIRPQVVTTFELPGCYDMWTVIAPVRKEEEDNPKGEGTEQEPSTTPEADDDGRRHGFLILSREDSTMILQTGQEIMELDTSGFATQGPTVFAGNIGDNRYIVQVSPLGIRLLEGVNQLHFIPVDLGAPIVQCAVADPYVVIMSAEGHVTMFLLKSDSYGGRHHRLALHKPPLHHQSKVITLCLYRDLSGMFTTESRLGGARDELGGRSGPEAEGLGSETSPTVDDEEEMLYGDSGSLFSPSKEEARRSSQPPADRDPAPFRAEPTHWCLLVRENGTMEIYQLPDWRLVFLVKNFPVGQRVLVDSSFGQPTTQGEARREEATRQGELPLVKEVLLVALGSRQSRPYLLVHVDQELLIYEAFPHDSQLGQGNLKVRFKKVPHNINFREKKPKPSKKKAEGGGAEEGAGARGRVARFRYFEDIYGYSGVFICGPSPHWLLVTGRGALRLHPMAIDGPVDSFAPFHNVNCPRGFLYFNRQGELRISVLPAYLSYDAPWPVRKIPLRCTAHYVAYHVESKVYAVATSTNTPCARIPRMTGEEKEFETIERDERYIHPQQEAFSIQLISPVSWEAIPNARIELQEWEHVTCMKTVSLRSEETVSGLKGYVAAGTCLMQGEEVTCRGRILIMDVIEVVPEPGQPLTKNKFKVLYEKEQKGPVTALCHCNGHLVSAIGQKIFLWSLRASELTGMAFIDTQLYIHQMISVKNFILAADVMKSISLLRYQEESKTLSLVSRDAKPLEVYSVDFMVDNAQLGFLVSDRDRNLMVYMYLPEAKESFGGMRLLRRADFHVGAHVNTFWRTPCRGATEGLSKKSVVWENKHITWFATLDGGIGLLLPMQEKTYRRLLMLQNALTTMLPHHAGLNPRAFRMLHVDRRTLQNAVRNVLDGELLNRYLYLSTMERSELAKKIGTTPDIILDDLLETDRVTAHF

SEQ ID NO: 1085 - protein, 400 aa, Homo Sapiens
MAAGGLSRSERKAAERVRRLREEQQRERLRQVSRILRKAAAERSAEEGRLLAESADLVTELQGRSRRREGLKRRQEEVCDDPEELRGKVRELASAVRNAKYLVVYTGAGISTAASIPDYRGPNGVWTLLQKGRSVSAADLSEAEPTLTHMSITRLHEQKLVQHVVSQNCDGLHLRSGLPRTAISELHGNMYIEVCTSCVPNREYVRVFDVTERTALHRHQTGRTCHKCGTQLRDTIVHFGERGTLGQPLNWEAATEAASRADTILCLGSSLKVLKKYPRLWCMTKPPSRRPKLYIVNLQWTPKDDWAALKLHGKCDDVMRLLMAELGLEIPAYSRWQDPIFSLATPLRAGEEGSHSRKSLCRSREEAPPGDRGAPLSSAPILGGWFGRGCTKRTKRKKVT

SEQ ID NO: 1086 - protein, 190 aa, Homo Sapiens
MAGSRLETVGSIFSRTRDLVRAGVLKEKPLWFDVYDAFPPLREPVFQRPRVRYGKAKAPIQDIWYHEDRIRAKFYSVYGSGQRAFDLFNPNFKSTCQRFVEKYTELQKLGETDEEKLFVETGKALLAEGVILRRVGEARTQHGGSHVSRKSEHLSVRPQTALEENETQKEVPQDQHLEAPADQSKGLLPP

SEQ ID NO: 1087 - protein, 467 aa, Homo Sapiens
MWRCPLGLLLLLPLAGHLALGAQQGRGRRELAPGLHLRGIRDAGGRYCQEQDLCCRGRADDCALPYLGAICYCDLFCNRTVSDCCPDFWDFCLGVPPPFPPIQGCMHGGRIYPVLGTYWDNCNRCTCQENRQWQCDQEPCLVDPDMIKAINQGNYGWQAGNHSAFWGMTLDEGIRYRLGTIRPSSSVMNMHEIYTVLNPGEVLPTAFEASEKWPNLIHEPLDQGNCAGSWAFSTAAVASDRVSIHSLGHMTPVLSPQNLLSCDTHQQQGCRGGRLDGAWWFLRRRGVVSDHCYPFSGRERDEAGPAPPCMMHSRAMGRGKRQATAHCPNSYVNNNDIYQVTPVYRLGSNDKEIMKELMENGPVQALMEVHEDFFLYKGGIYSHTPVSLGRPERYRRHGTHSVKITGWGEETLPDGRTLKYWTAANSWGPAWGERGHFRIVRGVNECDIESFVLGVWGRVGMEDMGHH

SEQ ID NO: 1088 - protein, 343 aa, Homo Sapiens
MAGGRPHLKRSFSIIPCFVFVESVLLGIVILLAYRLEFTDTFPVHTQGFFCYDSTYAKPYPGPEAASRVPPALVYALVTAGPTLTILLGELARAFFPAPPSAVPVIGESTIVSGACCRFSPPVRRLVRFLGVYSFGLFTTTIFANAGQVVTGNPTPHFLSVCRPNYTALGCLPPSPDRPGPDRFVTDQGACAGSPSLVAAARRAFPCKDAALCAYAVTYTAMYVTLVFRVKGSRLVKPSLCLALLCPAFLVGVVRVAEYRNHWSDVLAGFLTGAAIATFLVTCVVHNFQSRPPSGRRLSPWEDLGQAPTMDSPLEKNPRSAGRIRHRHGSPHPSRRTAPAVAT

SEQ ID NO: 1089 - protein, 351 aa, Homo Sapiens
MAVPAAAMGPSALGQSGPGSMAPWCSVSSGPSRYVLGMQELFRGHSKTREFLAHSAKVHSVAWSCDGRRLASGSFDKTASVFLLEKDRLVKENNYRGHGDSVDQLCWHPSNPDLFVTASGDKTIRIWDVRTTKCIATVNTKGENINICWSPDGQTIAVGNKDDVVTFIDAKTHRSKAEEQFKFEVNEISWNNDNNMFFLTNGNGCINILSYPELKPVQSINAHPSNCICIKFDPMGKYFATGSADALVSLWDVDELVCVRCFSRLDWPVRTLSFSHDGKMLASASEDHFIDIAEVETGDKLWEVQCESPTFTVAWHPKRPLLAFACDDKDGKYDSSREAGTVKLFGLPNDS

SEQ ID NO: 1090 - protein, 518 aa, Homo Sapiens
MDQTPPARPEYLVSGIRTPPVRRNSKLATLGRIFKPWKWRKKKNEKLKQTTSALEKKMAGRQGREELIKKGLLEMMEQDAESKTCNPDGGPRSVQSEPPTPKSETLTSEDAQPGSPLATGTDQVSLDKPLSSAAHLDDAAKMPSASSGEEADAGSLLPTTNELSQALAGADSLDSPPRPLERSVGQLPSPPLLPTPPPKASSKTTKNVTGQATLFQASSMKSADPSLRGQLSTPTGSPHLTTVHRPLPPSRVIEELHRALATKHRQDSFQGRESKGSPKKRLDVRLSRTSSVERGKEREEAWSFDGALENKRTAAKESEENKENLIINSELKDDLLLYQDEEALNDSIISGTLPRKCKKELLAVKLRNRPSKQELEDRNIFPRRTDEERQEIRQQIEMKLSKRLSQRPAVEELERRNILKQRNDQTEQEERREIKQRLTRKLNQRPTVDELRDRKILIRFSDYVEVAKAQDYDRRADKPWTRLSAADKAAIRKELNEYKSNEMEVHASSKHLTRFHRP

SEQ ID NO: 1091 - protein, 645 aa, Homo Sapiens [sequence omitted]

SEQ ID NO: 1092 - protein, 288 aa, Homo Sapiens
MSCTVRDVYDYFRAVLQRDERSERAFKLTRDAIELNAANYTVWHFRRVLLKSLQKDLHEEMNYITAIIEEQPKNYQVWHHRRVLVEWLRDPSQELEFIADILNQDAKNYHAWQHRQWVIQEFKLWDNELQYVDQLLKEDVRNNSVWNQRYFVISNTTGYNDRAVLEREVQYTLEMIKLVPHNESAWNYLKGILQDRGLSKYPNLLNQLLDLQPSHSSPYLIAFLVDIYEDMLENQCDNKEDILNKALELCEILAKEKDTIRKEYWRYIGRSLQSKHSTENDSPTNVQQ

SEQ ID NO: 1093 - protein, 607 aa, Homo Sapiens
MPRKKPFSVKQKKKQLQDKRERKRGLQDGLRSSSNSRSGSRERREEQTDTSDGESVTHHIRRLNQQPSQGLGPRGYDPNRYRLHFERDSREEVERRKRAAREQVLQPVSAELLELDIREVYQPGSVLDFPRRPPWSYEMSKEQLMSQEERSFQDYLGKIHGAYSSEKLSYFEHNLETWRQLWRVLEMSDIVLLITDIRHPVVNFPPALYEYVTGELGLALVLVLNKVDLAPPALVVAWKHYFHQHYPQLHVVLFTSFPRDPRTPQDPSSVLKKSRRRGRGWTRALGPEQLLRACEAITVGKVDLSSWREKIARDVAGATWGNGSGEEEEEEDGPAVLVEQQTDSAMEPTGPTQERYKDGVVTIGCVGFPNVGKSSLINGLVGRKVVSVSRTPGHTRYFQTYFLTPSVKLCDCPGLIFPSLLPRQLQVLAGIYPIAQIQEPYTAVGYLASRIPVQALLHLRHPEAEDPSAEHPWCAWDICEAWAEKRGYKTAKAARNDVYRAANSLLRLAVDGRLSLCFHPPGYSEQKGTWESHPETTELVVLQGRVGPAGDEEEEEEEELSSSCEEEGEEDRDADEEGEGDEETPTSAPGSSLAGRNPYALLGEDEC

SEQ ID NO: 1094 - protein, 209 aa, Homo Sapiens
MGKGDPNKPRGKMSSYAFFVQTCREEHKKKHPDSSVNFAEFSKKCSERWKTMSAKEKSKFEDMAKSDKARYDREMKNYVPPKGDKKGKKKDPNAPKRPPSAFFLFCSEHRPKIKSEHPGLSIGDTAKKLGEMWSEQSAKDKQPYEQKAAKLKEKYEKDIAAYRAKGKSEAGKKGPGRPTGSKKKNEPEDEEEEEEEEDEDEEEEDEDEE

SEQ ID NO: 1095 - protein, 911 aa, Homo Sapiens
MDGAMGPRGLLLCMYLVSLLILQAMPALGSATGRSKSSEKRQAVDTAVDGVFIRSLKVNCKVTSRFAHYVVTSQVVNTANEAREVAFDLEIPKTAFISDFAVTADGNAFIGDIKDKVTAWKQYRKAAISGENAGLVRASGRTMEQFTIHLTVNPQSKVTFQLTYEEVLKRNHMQYEIVIKVKPKQLVHHFEIDVDIFEPQGISKLDAQASFLPKELAAQTIKKSFSGKKGHVLFRPTVSQQQSCPTCSTSLLNGHFKVTYDVSRDKICDLLVANNHFAHFFAPQNLTNMNKNVVFVIDISGSMRGQKVKQTKEALLKILGDMQPGDYFDLVLFGTRVQSWKGSLVQASEANLQAAQDFVRGFSLDEATNLNGGLLRGIEILNQVQESLPELSNHASILIMLTDGDPTEGVTDRSQILKNVRNAIRGRFPLYNLGFGHNVDFNFLEVMSMENNGRAQRIYEDHDATQQLQGFYSQVAKPLLVDVDLQYPQDAVLALTQNHHKQYYEGSEIVVAGRIADNKQSSFKADVQAHGEGQEFSITCLVDEEEMKKLLRERGHMLENHVERLWAYLTIQELLAKRMKVDREERANLSSQALQMSLDYGFVTPLTSMSIRGMADQDGLKPTIDKPSEDSPPLEMLGPRRTFVLSALQPSPTHSSSNTQRLPDRVTGVDTDPHFIIHVPQKEDTLCFNINEEPGVILSLVQDPNTGFSVNGQLIGNKARSPGQHDGTYFGRLGIANPATDFQLEVTPQNITLNPGFGGPVFSWRDQAVLRQDGVVVTINKKRNLVVSVDDGGTFEVVLHRVWKGSSVHQDFLGFYVLDSHRMSARTHGLLGQFFHPIGFEVSDIHPGSDPTKPDATMVVRNRRLTVTRGLQKDYSKDPWHGAEVSCWFIHNNGAGLIDGAYTDYIVPDIF

SEQ ID NO: 1096 - protein, 1786 aa, Homo Sapiens
MGLLQLLAFSFLALCRARVRAQEPEFSYGCAEGSCYPATGDLLIGRAQKLSVTSTCGLHKPEPYCIVSHLQEDKKCFICNSQDPYHETLNPDSHLIENVVTTFAPNRLKIWWQSENGVENVTIQLDLEAEFHFTHLIMTFKTFRPAAMLIERSSDFGKTWGVYRYFAYDCEASFPGISTGPMKKVDDIICDSRYSDIEPSTEGEVIFRALDPAFKIEDPYSPRIQNLLKITNLRIKFVKLHTLGDNLLDSRMEIREKYYYAVYDMVVRGNCFCYGHASECAPVDGFNEEVEGMVHGHCMCRHNTKGLNCELCMDFYHDLPWRPAEGRNSNACKKCNCNEHSISCHFDMAVYLATGNVSGGVCDDCQHNTMGRNCEQCKPFYYQHPERDIRDPNFCERCTCDPAGSQNEGICDSYTDFSTGLIAGQCRCKLNVEGEHCDVCKEGFYDLSSEDPFGCKSCACNPLGTIPGGNPCDSETGHCYCKRLVTGQHCDQCLPEHWGLSNDLDGCRPCDCDLGGALNNSCFAESGQCSCRPHMIGRQCNEVEPGYYFATLDHYLYEAEEANLGPGVSIVERQYIQDRIPSWTGAGFVRVPEGAYLEFFIDNIPYSMEYDILIRYEPQLPDHWEKAVITVQRPGRIPTSSRCGNTIPDDDNQVVSLSPGSRYVVLPRPVCFEKGTNYTVRLELPQYTSSDSDVESPYTLIDSLVLMPYCKSLDIFTVGGSGDGVVTNSAWETFQRYRCLENSRSVVKTPMTDVCRNIIFSISALLHQTGLACECDPQGSLSSVCDPNGGQCQCRPNVVGRTCNRCAPGTFGFGPSGCKPCECHLQGSVNAFCNPVTGQCHCFQGVYARQCDRCLPGHWGFPSCQPCQCNGHADDCDPVTGECLNCQDYTMGHNCERCLAGYYGDPIIGSGDHCRPCPCPDGPDSGRQFARSCYQDPVTLQLACVCDPGYIGSRCDDCASGYFGNPSEVGGSCQPCQCHNNIDTTDPEACDKETGRCLKCLYHTEGEHCQFCRFGYYGDALQQDCRKCVCNYLGTVQEHCNGSDCQCDKATGQCLCLPNVIGQNCDRCAPNTWQLASGTGCDPCNCNAAHSFGPSCNEFTGQCQCMPGFGGRTCSECQELFWGDPDVECRACDCDPRGIETPQCDQSTGQCVCVEGVEGPRCDKCTRGYSGVFPDCTPCHQCFALWDVIIAELTNRTHRFLEKAKALKISGVIGPYRETVDSVERKVSEIKDILAQSPAAEPLKNIGNLFEEAEKLIKDVTEMMAQVEVKLSDTTSQSNSTAKELDSLQTEAESLDNTVKELAEQLEFIKNSDIRGALDSITKYFQMSLEAEERVNASTTEPNSTVEQSALMRDRVEDVMMERESQFKEKQEEQARLLDELAGKLQSLDLSAAAEMTCGTPPGASCSETECGGPNCRTDEGERKCGGPGCGGLVTVAHNAWQKAMDLDQDVLSALAEVEQLSKMVSEAKLRADEAKQSAEDILLKTNATKEKMDKSNEELRNLIKQIRNFLTQDSADLDSIEAVANEVLKMEMPSTPQQLQNLTEDIRERVESLSQVEVILQHSAADIARAEMLLEEAKRASKSATDVKVTADMVKEALEEAEKAQVAAEKAIKQADEDIQGTQNLLTSIESETAASEETLFNASQRISELERNVEELKRKAAQNSGEAEYIEKVVYTVKQSAEDVKKTLDGELDEKYKKVENLIAKKTEESADARRKAEMLQNEAKTLLAQANSKLQLLKDLERKYEDNQRYLEDKAQELARLEGEVRSLLKDISQKVAVYSTCL

SEQ ID NO: 1097 - protein, 725 aa, Homo Sapiens
MGLWWVTVQPPARRMGWLPLLLLLTQCLGVPGQRSPLNDFQVLRGTELQHLLHAVVPGPWQEDVADAEECAGRCGPLMDCRAFHYNVSSHGCQLLPWTQHSPHTRLRRSGRCDLFQKKDYVRTCIMNNGVGYRGTMATTVGGLPCQAWSHKFPNDHKYTPTLRNGLEENFCRNPDGDPGGPWCYTTDPAVRFQSCGIKSCREAACVWCNGEEYRGAVDRTESGRECQRWDLQHPHQHPFEPGKFLDQGLDDNYCRNPDGSERPWCYTTDPQIEREFCDLPRCGSEAQPRQEATTVSCFRGKGEGYRGTANTTTAGVPCQRWDAQIPHQHRFTPEKYACKDLRENFCRNPDGSEAPWCFTLRPGMRAAFCYQIRRCTDDVRPQDCYHGAGEQYRGTVSKTRKGVQCQRWSAETPHKPQFTFTSEPHAQLEENFCRNPDGDSHGPWCYTMDPRTPFDYCALRRCADDQPPSILDPPDQVQFEKCGKRVDRLDQRRSKLRVVGGHPGNSPWTVSLRNRQGQHFCGGSLVKEQWILTARQCFSSCHMPLTGYEVWLGTLFQNPQHGEPSLQRVPVAKMVCGPSGSQLVLLKLERSVTLNQRVALICLPPEWYVVPPGTKCEIAGWGETKGTGNDTVLNVALLNVISNQECNIKHRGRVRESEMCTEGLLAPVGACEGDYGGPLACFTHNCWVLEGIIIPNRVCARSRWPAVFTRVSVFVDWIHKVMRLG

SEQ ID NO: 1098 - protein, 440 aa, Homo Sapiens
MGQSQSGGHGPGGGKKDDKDKKKKYEPPVPTRVGKKKKKTKGPDAASKLPLVTPHTQCRLKLLKLERIKDYLLMEEEFIRNQEQMKPLEEKQEEERSKVDDLRGTPMSVGTLEEIIDDNHAIVSTSVGSEHYVSILSFVDKDLLEPGCSVLLNHKVHAVIGVLMDDTDPLVTVMKVEKAPQETYADIGGLDNQIQEIKESVELPLTHPEYYEEMGIKPPKGVILYGPPGTGKTLLAKAVANQTSATFLRVVGSELIQKYLGDGPKLVRELFRVAEEHAPSIVFIDEIDAIGTKRYDSNSGGEREIQRTMLELLNQLDGFDSRGDVKVIMATNRIETLDPALIRPGRIDRKIEFPLPDEKTKKRIFQIHTSRMTLADDVTLDDLIMAKDDLSGADIKAICTEAGLMALRERRMKVTNEDFKKSKENVLYKKQEGTPEGLYL

SEQ ID NO: 1099 - protein, 337 aa, Homo Sapiens
MSSSPVKRQRMESALDQLKQFTTVVADTGDFHAIDEYKPQDATTNPSLILAAAQMPAYQELVEEAIAYGRKLGGSQEDQIKNAIDKLFVLFGAEILKKIPGRVSTEVDARLSFDKDAMVARARRLIELYKEAGISKDRILIKLSSTWEGIQAGKELEEQHGIHCNMTLLFSFAQAVACAEAGVTLISPFVGRILDWHVANTDKKSYEPLEDPGVKSVTKIYNYYKKFSYKTIVMGASFRNTGEIKALAGCDFLTISPKLLGELLQDNAKLVPVLSAKAAQASDLEKIHLDEKSFRWLHNEDQMAVEKLSDGIRKFAADAVKLERMLTERMFNAENGK

SEQ ID NO: 1100 - protein, 682 aa, Homo Sapiens
MTKSKEAVTFKDVAVVFSEEELQLLDLAQRKLYRDVMLENFRNVVSVGHQSTPDGLPQLEREEKLWMMKMATQRDNSSGAKNLKEMETLQEVGLRYLPHEELFCSQIWQQITRELIKYQDSVVNIQRTGCQLEKRDDLHYKDEGFSNQSSHLQVHRVHTGEKPYKGEHCVKSFSWSSHLQINQRAHAGEKPYKCEKCDNAFRRFSSLQAHQRVHSRAKSYTNDASYRSFSQRSHLPHHQRVPTGENPYKYEECGRNVGKSSHCQAPLIVHTGEKPYKCEECGVGFSQRSYLQVHLKVHTGKKPYKCEECGKSFSWRSRLQAHERIHTGEKPYKCNACGKSFSYSSHLNIHCRIHTGEKPYKCEECGKGFSVGSHLQAHQISHTGEKPYKCEECGKGFCRASNLLDHQRGHTGEKPYQCDACGKGFSRSSDFNIHFRVHTGEKPYKCEECGKGFSQASNLLAHQRGHTGEKPYKCGTCGKGFSRSSDLNVHCRIHTGEKPYKCERCGKAFSQFSSLQVHQRVHTGEKPYQCAECGKGFSVGSQLQAHQRCHTGEKPYQCEECGKGFCRASNFLAHRGVHTGEKPYRCDVCGKRFRQRSYLQAHQRVHTGERPYKCEECGKVFSWSSYLQAHQRVHTGEKPYKCEECGKGFSWSSSLIIHQRVHADDEGDKDFPSSEDSHRKTR

SEQ ID NO: 1101 - protein, 368 aa, Homo Sapiens
MSLFGTTSGFGTSGTSMFGSATTDNHNPMKDIEVTSSPDDSIGCLSFSPPTLPGNFLIAGSWANDVRCWEVQDSGQTIPKAQQMHTGPVLDVCWSDDGSKVFTASCDKTAKMWDLSSNQAIQIAQHDAPVKTIHWIKAPNYSCVMTGSWDKTLKFWDTRSSNPMMVLQLPERCYCADVIYPMAVVATAERGLIVYQLENQPSEFRRIESPLKHQHRCVAIFKDKQNKPTGFALGSIEGRVAIHYINPPNPAKDNFTFKCHRSNGTNTSAPQDIYAVNGIAFHPVHGTLATVGSDGRFSFWDKDARTKLKTSEQLDQPISACCFNHNGNIFAYASSYDWSKGHEFYNPQKKNYIFLRNAAEELKPRNKK

SEQ ID NO: 1102 - protein, 346 aa, Homo Sapiens
MTATLAAAADIATMVSGSSGLAAARLLSRSFLLPQNGIRHCSYTASRQHLYVDKNTKIICQGFTGKQGTFHSQQALEYGTKLVGGTTPGKGGQTHLGLPVFNTVKEAKEQTGATASVIYVPPPFAAAAINEAIEAEIPLVVCITEGIPQQDMVRVKHKLLRQEKTRLIGPNCPGVINPGECKIGIMPGHIHKKGRIGIVSRSGTLTYEAVHQTTQVGLGQSLCVGIGGDPFNGTDFIDCLEIFLNDSATEGIILIGEIGGNAEENAAEFLKQHNSGPNSKPVVSFIAGLTAPPGRRMGHAGAIIAGGKGGAKEKISALQSAGVVVSMSPAQLGTTIYKEFEKRKML

SEQ ID NO: 1103 - protein, 144 aa, Homo Sapiens
MPKVKRSRKAPPDGWELIEPTLDELDQKMREAETEPHEGKRKVESLWPIFRIHHQKTRYIFDLFYKRKAISRELYEYCIKEGYADKNLIAKWKKQGYENLCCLRCIQTRDTNFGTNCICRVPKSKLEVGRIIECTHCGCRGCSG

SEQ ID NO: 1104 - protein, 747 aa, Homo Sapiens
MGRSNSRSHSSRSKSRSQSSSRSRSRSHSRKKRYSSRSRSRTYSRSRSRDRMYSRDYRRDYRNNRGMRRPYGYRGRGRGYYQGGGGRYHRGGYRPVWNRRHSRSPRRGRSRSRSPKRRSVSSQRSRSRSRRSYRSSRSPRSSSSRSSSPYSKSPVSKRRGSQEKQTKKAEGEPQEESPLKSKSQEEPKDTFEHDPSESIDEFNKSSATSGDIWPGLSAYDNSPRSPHSPSPIATPPSQSSSCSDAPMLSTVHSAKNTPSQHSHSIQHSPERSGSGSVGNGSSRYSPSQNSPIHHIPSRRSPAKTIAPQNAPRDESRGRSSFYPDGGDQETAKTGKFLKSPPLHKNLDAREKSTFREESPLRIKMIASDSHRPEVKLKMAPVPLDDSNRPASLTKDRLLASTLVHSVKKEQEFRSIFDHIKLPQASKSTSESFIQHIVSLVHHVKEQYFKSAAMTLNERFTSYQKATEEHSTRQKSPEIHRRIDISPSTLRKHTRLAGEERVFKEENQKGDKKLRCDSADLRHDIDRRRKERSKERGDSKGSRESSGSRKQEKTPKDYKEYKSYKDDSKHKREQDHSRSSSSSASPSSPSSREEKESKKEREEEFKTHHEMKEYSGFAGVSRPRGTFFRIRGRGRARGVFAGTNTGPNNSNTTFQKRPKEEEWDPEYTPKSKKYFLHDDRDDGVDYWAKRGRGRGTFQRGRGRFNFKKSGSSPKWTHDKYQGDGIVEDEEETMENNEEKKDRRKEEKE

SEQ ID NO: 1105 - protein, 247 aa, Homo Sapiens
MQVVKEQVMRALTTKPSSLDQFKSKLQNLSYTEILKIRQSERMNQEDFQSRPILELKEKIQPEILELIKQQRLNRLVEGTCFRKLNARRRQDKFWYCRLSPNHKVLHYGDLEESPQGEVPHDSLQDKLPVADIKAVVTGKDCPHMKEKGALKQNKEVLELAFSILYDSNCQLNFIAPDKHEYCIWTDGLNALLGKDMMSDLTRNDLDTLLSMEIKLRLLDLENIQIPDAPPPIPKEPSNYDFVYDCN

SEQ ID NO: 1106 - protein, 252 aa, Homo Sapiens
MAQLCGLRRSRAFLALLGSLLLSGVLAADRERSIHDFCLVSKVVGRCRASMPRWWYNVTDGSCQLFVYGGCDGNSNNYLTKEECLKKCATVTENATGDLATSRNAADSSVPSAPRRQDSEDHSSDMFNYEEYCTANAVTGPCRASFPRWYFDVERNSCNNFIYGGCRGNKNSYRSEEACMLRCFRQQENPPLPLGSKVVVLAGLFVMVLILFLGASMVYLIRVARRNQERALRTVWSSGDDKEQLVKNTYVL

SEQ ID NO: 1107 - protein, 540 aa, Homo Sapiens
SSKPKLKKRFSLRSVGRSVRGSVRGILQWRGTVDPPSSAGPLETSSGPPVLGGNSNSNSSGGAGTVGRGLVSDGTSPGERWTHRFERLRLSRGGGALKDGAGMVQREELLSFMGAEEAAPDPAGVGRGGGVAGPPSGGGGQPQWQKCRLLLRSEGEGGGGSRLEFFVPPKASRPRLSIPCSSITDVRTTTALEMPDRENTFVVKVEGPSEYIMETVDAQHVKAWVSDIQECLSPGPCPATSPRPMTLPLAPGTSFLTRENTDSLELSCLNHSESLPSQDLLLGPSESNDRLSQGAYGGLSDRPSASISPSSASIAASHFDSMELLPPELPPRIPIEEGPPTGTVHPLSAPYPPLDTPETATGSFLFQGEPEGGEGDQPLSGYPWFHGMLSRLKAAQLVLTGGTGSHGVFLVRQSETRRGEYVLTFNFQGKAKHLRLSLNEEGQCRVQHLWFQSIFDMLEHFRVHPIPLESGGSSDVVLVSYVPSSQRQQGEQSRSAGEEVPVHPRSEAGSRLGAMRGCAREMDATPMPPAPSCPSERVTV

SEQ ID NO: 1108 - protein, 227 aa, Homo Sapiens
MQKLLLEAGGTGPVRSDLGRWPDHLCAVCRHYHHLLHLLLLLPLQDVPPTTSGCHHHHIHHCGACPLSSASKCAAQLPWTKLPGLPHHAASARDASSTLPNAVPTTLPSPAHGPTGLPRDPGWRSSRALPRQPASLQPGLHGCPEGGPLSIPWPLWLPLGYVVCVREWCAGAVPYAPCVLCVSRHGSLRPMCAVCVLPVYVASSDADKVGNNPCQSGLGPDFVLFLT

SEQ ID NO: 1109 - protein, 2799 aa, Homo Sapiens
MTSIHFVVHPLPGTEDQLNDRLREVSEKLNKYNLNSHPPLNVLEQATIKQCVVGPNHAAFLLEDGRVCRIGFSVQPDRLELGKPDNNDGSKLNSNSGAGRTSRPGRTSDSPWFLSGSETLGRLAGNTLGSRWSSGVGGSGGGSSGRSSAGARDSRRQTRVIRTGRDRGSGLLGSQPQPVIPASVIPEELISQAQVVLQGKSRSVIIRELQRTNLDVNLAVNNLLSRDDEDGDDGDDTASESYLPGEDLMSLLDADIHSAHPSVIIDADAMFSEDISYFGYPSFRRSSLSRLGSSRVLLLPLERDSELLRERESVLRLRERRWLDGASFDNERGSTSKEGEPNLDKKNTPVQSPVSLGEDLQWWPDKDGTKFICIGALYSELLAVSSKGELYQWKWSESEPYRNAQNPSLHHPRATFLGLTNEKIVLLSANSIRATVATENNKVATWVDETLSSVASKLEHTAQTYSELQGERIVSLHCCALYTCAQLENSLYWWGVVPFSQRKKMLEKARAKNKKPKSSAGISSMPNITVGTQVCLRNNPLYHAGAVAFSISAGIPKVGVLMESVWNMNDSCRFQLRSPESLKNMEKASKTTEAKPESKQEPVKTEMGPPPSPASTCSDASSIASSASMPYKRRRSTPAPKEEEKVNEEQWSLREVVFVEDVKNVPVGKVLKVDGAYVAVKFPGTSSNTNCQNSSGPDADPSSLLQDCRLLRIDELQVVKTGGTPKVPDCFQRTPKKLCIPEKTEILAVNVDSKGVHAVLKTGNWVRYCIFDLATGKAEQENNFPTSSIAFLGQNERNVAIFTAGQESPIILRDGNGTIYPMAKDCMGGIRDPDWLDLPPISSLGMGVHSLINLPANSTIKKKAAVIIMAVEKQTLMQHILRCDYEACRQYLMNLEQAVVLEQNLQMLQTFISHRCDGNRNILHACVSVCFPTSNKETKEEEEAERSERNTFAERLSAVEAIANAISVVSSNGPGNRAGSSSSRSLRLREMMRRSLRAAGLGRHEAGASSSDHQDPVSPPIAPPSWVPDPPAMDPDGDIDFILAPAVGSLTTAATGTGQGPSTSTIPGPSTEPSVVESKDRKANAHFILKLLCDSVVLQPYLRELLSAKDARGMTPFMSAVSGRAYPAAITILETAQKIAKAEISSSEKEEDVFMGMVCPSGTNPDDSPLYVLCCNDTCSFTWTGAEHINQDIFECRTCGLLESLCCCTECARVCHKGHDCKLKRTSPTAYCDCWEKCKCKTLIAGQKSARLDLLYRLLTATNLVTLPNSRGEHLLLFLVQTVARQTVEHCQYRPPRIREDRNRKTASPEDSDMPDHDLEPPRFAQLALERVLQDWNALKSMIMFGSQENKDPLSASSRIGHLLPEEQVYLNQQSGTIRLDCFTHCLIVKCTADILLLDTLLGTLVKELQNKYTPGRREEAIAVTMRFLRSVARVFVILSVEMASSKKKNNFIPQPIGKCKRVFQALLPYAVEELCNVAESLIVPVRMGIARPTAPFTLASTSIDAMQGSEELFSVEPLPPRPSSDQSSSSSQSQSSYIIRNPQQRRISQSQPVRGRDEEQDDIVSADVEEVEVVEGVAGEEDHHDEQEEHGEENAEAEGQHDEHDEDGSDMELDLLAAAETESDSESNHSNQDNASGRRSVVTAATAGSEAGASSVPAFFSEDDSQSNDSSDSDSSSSQSDDIEQETFMLDEPLERTTNSSHANGAAQAPRSMQWAVRNTQHQRAASTAPSSTSTPAASSAGLIYIDPSNLRRSGTISTSAAAAAAALEASNASSYLTSASSLARAYSIVIRQISDLMGLIPKYNHLVYSQIPAAVKLTYQDAVNLQNYVEEKLIPTWNWMVSIMDSTEAQLRYGSALASAGDPGHPNHPLHASQNSARRERMTAREEASLRTLEGRRRATLLSARQGMMSARGDFLNYALSLMRSHNDEHSDVLPVLDVCSLKHVAYVFQALIYWIKAMNQQTTLDTPQLERKRTRELLELGIDNEDSEHENDDDTNQSATLNDKDDDSLPAETGQNHPFFRRSDSMTFLGCIPPNPFEVPLAEAIPLADQPHLLQPNARKEDLFGRPSQGLYSSSASSGKCLMEVTVDRNCLEVLPTKMSYAANLKNVMNMQNRQKKEGEEQPVLPEETESSKPGPSAHDLAAQLKSSLLAEIGLTESEGPPLTSFRPQCSFMGMVISHDMLLGRWRLSLELFGRVFMEDVGAEPGSILTELGGFEVKESKFRREMEKLRNQQSRDLSLEVDRDRDLLIQQTMRQLNNHFGRRCATTPMAVHRVKVTFKDEPGEGSGVARSFYTAIAQAFLSNEKLPNLECIQNANKGTHTSLMQRLRNRGERDREREREREMRRSSGLRAGSRRDRDRDFRRQLSIDTRPFRPASEGNPSDDPEPLPAHRQALGERLYPRVQAMQPAFASKITGMLLELSPAQLLLLLASEDSLRARVDEAMELIIAHGRENGADSILDLGLVDSSEKVQQENRKRHGSSRSVVDMDLDDTDDGDDNAPLFYQPGKRGFYTPRPGKNTEARLNCFRNIGRILGLCLLQNELCPITLNRHVIKVLLGRKVNWHDFAFFDPVMYESLRQLILASQSSDADAVFSAMDLAFAIDLCKEEGGGQVELIPNGVNIPVTPQNVYEYVRKYAEHRMLVVAEQPLHAMRKGLLDVLPKNSLEDLTAEDFRLLVNGCGEVNVQMLISFTSFNDESGENAEKLLQFKRWFWSIVEKMSMTERQDLVYFWTSSPSLPASEEGFQPMPSITIRPPDDQHLPTANTCISRLYVPLYSSKQILKQKLLLAIKTKNFGFV

SEQ ID NO: 1110 - protein, 419 aa, Homo Sapiens
MPGRGRCPDCGSTELVEDSHYSQSQLVCSDCGCVVTEGVLTTTFSDEGNLREVTYSRSTGENEQVSRSQQRGLRRVRDLCRVLQLPPTFEDTAVAYYQQAYRHSGIRAARLQKKEVLVGCCVLITCRQHNWPLTMGAICTLLYADLDVFSSTYMQIVKLLGLDVPSLCLAELVKTYCSSFKLFQASPSVPAKYVEDKEKMLSRTMQLVELANETWLVTGRHPLPVITAATFLAWQSLQPADRLSCSLARFCKLANVDLPYPASSRLQELLAVLLRMAEQLAWLRVLRLDKRSVVKHIGDLLQHRQSLVRSAFRDGTAEVETREKEPPGWGQGQGEGEVGNNSLGLPQGKRPASPALLLPPCMLKSPKRICPVPPVSTVTGDENISDSEIEQYLRTPQEVRDFQRAQAARQAATSVPNPP

SEQ ID NO: 1111 - protein, 344 aa, Homo Sapiens
MNLLPCNPHGNGLLYAGFNQDHGCFACGMENGFRVYNTDPLKEKEKQEFLEGGVGHVEMLFRCNYLALVGGGKKPKYPPNKVMIWDDLKKKTVIEIEFSTEVKAVKLRRDRIVVVLDSMIKVFTFTHNPHQLHVFETCYNPKGLCVLCPNSNNSLLAFPGTHTGHVQLVDLASTEKPPVDIPAHEGVLSCIALNLQGTRIATASEKGTLIRIFDTSSGHLIQELRRGSQAANIYCINFNQDASLICVSSDHGTVHIFAAEDPKRNKQSSLASASFLPKYFSSKWSFSKFQVPSGSPCICAFGTEPNAVIAICADGSYYKFLFNPKGECIRDVYAQFLEMTDDKL

SEQ ID NO: 1112 - protein, 370 aa, Homo Sapiens
MLPRRLLAAWLAGTRGGGLLALLANQCRFVTGLRVRRAQQIAQLYGRLYSESSRRVLLGRLWRRLHGRPGHASALMAALAGVFVWDEERIQEEELQRSINEMKRLEEMSNMFQSSGVQHHPPEPKAQTEGNEDSEGKEQRWEMVMDKKHFKLWRRPITGTHLYQYRVFGTYTDVTPRQFFNVQLDTEYRKKWDALVIKLEVIERDVVSGSEVLHWVTHFPYPMYSRDYVYVRRYSVDQENNMMVLVSRAVEHPSVPESPEFVRVRSYESQMVIRPHKSFDENGFDYLLTYSDNPQTVFPRYCVSWMVSSGMPDFLEKLHMATLKAKNMEIKVKDYISAKPLEMSSEAKATSQSSERKNEGSCGPARIEYA

SEQ ID NO: 1113 - protein, 342 aa, Homo Sapiens
MRKETPPPLVPPAAREWNLPPNAPACMERQLEAARYRSDGALLLGASSLSGRCWAGSLWLFKDPCAAPNEGFCSAGVQTEAGVADLTWVGERGILVASDSGAVELWELDENETLIVSKFCKYEHDDIVSTVSVLSSGTQAVSGSKDICIKVWDLAQQVVLSSYRAHAAQVTCVAASPHKDSVFLSCSEDNRILLWDTRCPKPASQIGCSAPGYLPTSLAWHPQQSEVFVFGDENGTVSLVDTKSTSCVLSSAVHSQCVTGLVFSPHSVPFLASLSEDCSLAVLDSSLSELFRSQAHRDFVRDATWSPLNHSLLTTVGWDHQVVHHVVPTEPLPAPGPASVTE

SEQ ID NO: 1114 - protein, 648 aa, Homo Sapiens
MSWLFGVNKGPKGEGAGPPPPLPPAQPGAEGGGDRGLGDRPAPKDKWSNFDPTGLERAAKAARELEHSRYAKEALNLAQMQEQTLQLEQQSKLKEYEAAVEQLKSEQIRAQAEERRKTLSEETRQHQARAQYQDKLARQRYEDQLKQQQLLNEENLRKQEESVQKQEAMRRATVEREMELRHKNEMLRVETEARARAKAERENADIIREQIRLKASEHRQTVLESIRTAGTLFGEGFRAFVTDRDKVTATVAGLTLLAVGVYSAKNATAVTGRFIEARLGKPSLVRETSRITVLEALRHPIQVSRRLLSRPQDVLEGVVLSPSLEARVRDIAIATRNTKKNRGLYRHILLYGPPGTGKTLFAKKLALHSGMDYAIMTGGDVAPMGREGVTAMHKLFDWANTSRRGLLLFMDEADAFLRKRATEEISKDLRATLNAFLYHMGQHSNKFMLVLASNLPEQFDCAINSRIDVMVHFDLPQQEERERLVRLHFDNCVLKPATEGKRRLKLAQFDYGRKCSEVARLTEGMSGREIAQLAVSWQATAYASKDGVLTEAMMDACVQDAVQQYRQKMRWLKAEGPGRGVEHPLSGVQGETLTSWSLATDPSYPCLAGPCTFRICSWMGTGLCPGPLSPRMSCGGGRPFCPPGHPLL

SEQ ID NO: 1115 - protein, 343 aa, Homo Sapiens
MQPPPPGPLGDCLRDWEDLQQDFQNIQETHRLYRLKLEELTKLQNNCTSSITRQKKRLQELALALKKCKPSLPAEAEGAAQELENQMKERQGLFFDMEAYLPKKNGLYLSLVLGNVNVTLLSKQAKFAYKDEYEKFKLYLTIILILISFTCRFLLNSRVTDAAFNFLLVWYYCTLTIRESILINNGSRIKGWWVFHHYVSTFLSGVMLTWPDGLMYQKFRNQFLSFSMYQSFVQFLQYYYQSGCLYRLRALGERHTMDLTVEGFQSWMWRGLTFLLPFLFFGHFWQLFNALTLFNLAQDPQCKEWQVLMCGFPFLLLFLGNFFTTLRVVHHKFHSQRHGSKKD

SEQ ID NO: 1116 - protein, 590 aa, Homo Sapiens
MSGDYEDDLCRRALILVSDLCARVRDADTNDRCQEFNDRIRGYPRGPDADISVSLLSVIVTFCGIVLLGVSLFVSWKLCWVPWRDKGGSAVGGGPLRKDLGPGVGLAGLVGGGGHHLAAGLGGHPLLGGPHHHAHAAHHPPFAELLEPGSLGGSDTPEPSYLDMDSYPEAAAAAVAAGVKPSQTSPELPSEGGAGSGLLLLPPSGGGLPSAQSHQQVTSLAPTTRYPALPRPLTQQTLTSQPDPSSEERPPALPLPLPGGEEKAKLIGQIKPELYQGTGPGGRRSGGGPGSGEAGTGAPCGRISFALRYLYGSDQLVVRILQALDLPAKDSNGFSDPYVKIYLLPDRKKKFQTKVHRKTLNPVFNETFQFSVPLAELAQRKLHFSVYDFDRFSRHDLIGQVVLDNLLELAEQPPDRPLWRDIVEGGSEKADLGELNFSLCYLPTAGRLTVTIIKASNLKAMDLTGFSDPYVKASLISEGRRLKKRKTSIKKNTLNPTYNEALVFDVAPESVENVGLSIAVVDYDCIGHNEVIGVCRVGPDAADPHGREHWAEMLANPRKPVEHWHQLVEEKTVTSFTKGSKGLSEKENSE

SEQ ID NO: 1117 - protein, 1336 aa, Homo Sapiens
MAGPQMGGSAEDHPPRKRHAAEKQKKKTVIYTKCFEFESATQRPIDRQRYDENEDLSDVEEIVSVRGFSLEEKLRSQLYQGDFVHAMEGKDFNYEYVQREALRVPLIFREKDGLGIKMPDPDFTVRDVKLLVGSRRLVDVMDVNTQKGTEMSMSQFVRYYETPEAQRDKLYNVISLEFSHTKLEHLVKRPTVVDLVDWVDNMWPQHLKEKQTEATNAIAEMKYPKVKKYCLMSVKGCFTDFHIDFGGTSVWYHVFRGGKIFWLIPPTLHNLALYEEWVLSGKQSDIFLGDRVERCQRIELKQGYTFFIPSGWIHAVYTPVDSLVFGGNILHSFNVPMQLRIYEIEDRTRVQPKFRYPFYYEMCWYVLERYVYCVTQRSHLTQEYQRESMLIDAPRKPSIDGFSSDSWLEMEEEACDQQPQEEEEKDEEGEGRDRAPKPPTDGSTSPTSTPSEDQEALGKKPKAPALRFLKRTLSNESEESVKSTTLAVDYPKTPTGSPATEVSAKWTHLTEFELKGLKALVEKLESLPENKKCVPEGIEDPQALLEGVKNVLKEHADDDPSLAITGVPVVTWPKKTPKNRAVGRPKGKLGPASAVKLAANRTTAGARRRRTRCRKCEACLRTECGECHFCKDMKKFGGPGRMKQSCIMRQCIAPVLPHTAVCLVCGEAGKEDTVEEEEGKFNLMLMECSICNEIIHPGCLKIKESEGVVNDELPNCWECPKCNHAGKTGKQKRGPGFKYASNLPGSLLKEQKMNRDNKEGQEPAKRRSECEEAPRRRSDEHSKKVPPDGLLRRKSDDVHLRKKRKYEKPQELSGRKRASSLQTSPGSSSHLSPRPPLGSSLSPWWRSSLTYFQQQLKPGKEDKLFRKKRRSWKNAEDRMALANKPLRRFKQEPEDELPEAPPKTRESDHSRSSSPTAGPSTEGAEGPEEKKKVKMRRKRRLPNKELSRELSKELNHEIQRTENSLANENQQPIKSEPESEGEEPKRPPGICERPHRFSKGLNGTPRELRHQLGPSLRSPPRVISRPPPSVSPPKCIQMERHVIRPPPISPPPDSLPLDDGAAHVMHREVWMAVFSYLSHQDLCVCMRVCRTWNRWCCDKRLWTRIDLNHCKSITPLMLSGIIRRQPVSLDLSWTNISKKQLSWLINRLPGLRDLVLSGCSWIAVSALCSSSCPLLRTLDVQWVEGLKDAQMRDLLSPPTDNRPGQMDNRSKLRNIVELRLAGLDITDASLRLIIRHMPLLSKLHLSYCNHVTDQSINLLTAVGTTTRDSLTEINLSDCNKVTDQCLSFFKRCGNICHIDLRYCKQVTKEGCEQFIAEMSVSVQFGQVEEKLLQKLS

SEQ ID NO: 1118 - protein, 306 aa, Homo Sapiens
MAEVSIDQSKLPGVKEVCRDFAVLEDHTLAHSLQEQEIEHHLASNVQRNRLVQHDLQVAKQLQEEDLKAQAQLQKRYKDLEQQDCEIAQEIQEKLAIEAERRRIQEKKDEDIARLLQEKELQEEKKRKKHFPEFPATRAYADSYYYEDGGMKPRVMKEAVSTPSRMAHRDQEWYDAEIARKLQEEELLATQVDMRAAQVAQDEEIARLLMAEEKKAYKKAKEREKSSLDKRKQDPEWKPKTAKAANSKSKESDEPHHSKNERPARPPPPIMTDGEDADYTHFTNQQSSTRHFSKSESSHKGFHYKH

SEQ ID NO: 1119 - protein, 212 aa, Homo Sapiens
MEVLRRSSVFAAEIMDAFDRSPTDKELVAQAKALGREYVHARLLRAGLSWSAPERAAPVPGRLAEVCAVLLRLGDELEMIRPSVYRNVARQLHISLQSEPVVTDAFLAVAGHIFSAGITWGKVVSLYAVAAGLAVDCVRQAQPAMVHALVDCLGEFVRKTLATWLRRRGGWTDVLKCVVSTDPGLRSHWLVAALCSFGRFLKAAFFVLLPER

SEQ ID NO: 1120 - protein, 282 aa, Homo Sapiens
MLPLLRCVPRVLGSSVAGLRAAAPASPFRQLLQPAPRLCTRPFGLLSVRAGSERRPGLLRPRGPCACGCGCGSLHTDGDKAFVDFLSDEIKEERKIQKHKTLPKMSGGWELELNGTEAKLVRKVAGEKITVTFNINNSIPPTFDGEEEPSQGQKVEEQEPELTSTPNFVVEVIKNDDGKKALVLDCHYPEDEVGQEDEAESDIFSIREVSFQSTGESEWKDTNYTLNTDSLDWALYDHLMDFLADRGVDNTFADELVELSTALEHQEYITFLEDLKSFVKSQ

SEQ ID NO: 1121 - protein, 301 aa, Homo Sapiens
MADQPKPISPLKNLLAGGFGGVCLVFVGHPLDTVKVRLQTQPPSLPGQPPMYSGTFDCFRKTLFREGITGLYRGMAAPIIGVTPMFAVCFFGFGLGKKLQQKHPEDVLSYPQLFAAGMLSGVFTTGIMTPGERIKCLLQIQASSGESKYTGTLDCAKKLYQEFGIRGIYKGTVLTLMRDVPASGMYFMTYEWLKNIFTPEGKRVSELSAPRILVAGGIAGIFNWAVAIPPDVLKSRFQTAPPGKYPNGFRDVLRELIRDEGVTSLYKGFNAVMIRAFPANAACFLGFEVAMKFLNWATPNL

SEQ ID NO: 1122 - protein, 102 aa, Homo Sapiens
MSSPPEGKLETKAGHPPAVKAGGMRIVQKHPHTGDTKEEKDKDDQEWESPSPPKPTVFISGVIARGDKDFPPAAAQVAHQKPHASMDKHPSPRTQHIQQPRK

SEQ ID NO: 1123 - protein, 285 aa, Homo Sapiens
MSEAGEEQPMETTGATENGHEAVPEGESPAGAGTGAAAGAGGATAAPPSGNQNGAEGDQINASKNEEDAGKMFVGGLSWDTSKKDLKDYFTKFGEVVDCTIKMDPNTGRSRGFGFILFKDAASVEKVLDQKEHRLDGRVIDPKKAMAMKKDPVKKIFVGGLNPEATEEKIREYFGEFGEIEAIELPMDPKLNKRRGFVFITFKEEEPVKKVLEKKFHTVSGSKCEIKVAQPKEVYQQQQYGSGGRGNRNRGNRGSGGGGGGGGQGSTNYGKSQRRGGHQNNYKPY

SEQ ID NO: 1124 - protein, 281 aa, Homo Sapiens
MGQKKQRPARAGQPHSSSDAAQAPAEQPHSSSDAAQAPCPRERCLGPPTTPGPYRSIYFSSPKGHLTRLGLEFFDQPAVPLARAFLGQVLVRRLPNGTELRGRIVETEAYLGPEDEAAHSRGGRQTPRNRGMFMKPGTLYVYIIYGMYFCMNISSQGDGACVLLRALEPLEGLETMRQLRSTLRKGTASRVLKDRELCSGPSKLCQALAINKSFDQRDLAQDEAVWLERGPLEPSEPAVVAAARVGVGHAGEWARKPLRFYVRGSPWVSVVDRVAEQDTQA

SEQ ID NO: 1125 - protein, 808 aa, Homo Sapiens
MGRKLDPTKEKRGPGRKARKQKGAETELVRFLPAVSDENSKRLSSRARKRAAKRRLGSVEAPKTNKSPEAKPLPGKLPKGAVQTAGKKGPQSLFNAPRGKKRPAPGSDEEEEEEDSEEDGMVNHGDLWGSEDDADTVDDYGADSNSEDEEEGEALLPIERAARKQKAREAAAGIQWSEEETEDEEEEKEVTPESGPPKVEEADGGLQINVDEEPFVLPPAGEMEQDAQAPDLQRVHKRIQDIVGILRDFGAQREEGRSRSEYLNRLKKDLAIYYSYGDFLLGKLMDLFPLSELVEFLEANEVPRPVTLRTNTLKTRRRDLAQALINRGVNLDPLGKWSKTGLVVYDSSVPIGATPEYLAGHYMLQGASSMLPVMALAPQEHERILDMCCAPGGKTSYMAQLMKNTGVILANDANAERLKSVVGNLHRLGVTNTIISHYDGRQFPKVVGGFDRVLLDAPCSGTGVISKDPAVKTNKDEKDILRCAHLQKELLLSAIDSVNATSKTGGYLVYCTCSITVEENEWVVDYALKKRNVRLVPTGLDFGQEGFTRFRERRFHPSLRSTRRFYPHTHNMDGFFIAKFKKFSNSIPQSQTGNSETATPTNVDLPQVIPKSENSSQPAKKAKGAAKTKQQLQKQQHPKKASFQKLNGISKGADSELSTVPSVTKTQASSSFQDSSQPAGKAEGIREPKVTGKLKQRSPKLQSSKKVAFLRQNAPPKGTDTQTPAVLSPSKTQATLKPKDHHQPLGRAKGVEKQQLPEQPFEKAAFQKQNDTPKGPQPPTVSPIRSSRPPPAKRKKSQSRGNSQLLLS

SEQ ID NO: 1126 - protein, 261 aa, Homo Sapiens
MFEARLVQGSILKKVLEALKDLINEACWDISSSGVNLQSMDSSHVSLVQLTLRSEGFDTYRCDRNLAMGVNLTSMSKILKCAGNEDIITLRAEDNADTLALVFEAPNQEKVSDYEMKLMDLDVEQLGIPEQEYSCVVKMPSGEFARICRDLSHIGDAVVISCAKDGVKFSASGELGNGNIKLSQTSNVDKEEEAVTIEMNEPVQLTFALRYLNFFTKATPLSSTVTLSMSADVPLVVEYKIADMGHLKYYLAPKIEDEEGS

SEQ ID NO: 1127 - protein, 128 aa, Homo Sapiens
MQIFVKTLTGKTITLEVEPSDTIENVKAKIQDKEGIPPDQQRLIFAGKQLEDGRTLSDYNIQKESTLHLVLRLRGGIIEPSLRQLAQKYNCDKMICRKCYARLHPRAVNCRKKKCGHTNNLRPKKKVK

SEQ ID NO: 1128 - protein, 633 aa, Homo Sapiens
MPEIRLRHVVSCSSQDSTHCAENLLKADTYRKWRAAKAGEKTISVVLQLEKEEQIHSVDIGNDGSAFVEVLVGSSAGGAGEQDYEVLLVTSSFMSPSESRSGSNPNRVRMFGPDKLVRAAAEKRWDRVKIVCSQPYSKDSPFGLSFVRFHSPPDKDEAEAPSQKVTVTKLGQFRVKEEDESANSLRPGALFFSRINKTSPVTASDPAGPSYAAATLQASSAASSASPVSRAIGSTSKPQESPKGKRKLDLNQEEKKTPSKPPAQLSPSVPKRPKLPAPTRTPATAPVPARAQGAVTGKPRGEGTEPRRPRAGPEELGKILQGVVVVLSGFQNPFRSELRDKALELGAKYRPDWTRDSTHLICAFANTPKYSQVLGLGGRIVRKEWVLDCHRMRRRLPSQRYLMAGPGSSSEEDEASHSGGSGDEAPKLPQKQPQTKTKPTQAAGPSSPQKPPTPEETKAASPVLQEDIDIEGVQSEGQDNGAEDSGDTEDELRRVAEQKEHRLPPGQEENGEDPYAGSTDENTDSEEHQEPPDLPVPELPDFFQGKHFFLYGEFPGDERRKLIRYVTAFNGELEDYMSDRVQFVITAQEWDPSFEEALMDNPSLAFVRPRWIYSCNEKQKLLPHQLYGVVPQA

SEQ ID NO: 1129 - protein, 380 aa, Homo Sapiens
MTEEVIVIAKWDYTAQQDQELDIKKNERLWLLDDSKTWWRVRNAANRTGYVPSNYVERKNSLKKGSLVKNLKDTLGLGKTRRKTSARDASPTPSTDAEYPANGSGADRIYDLNIPAFVKFAYVAEREDELSLVKGSRVTVMEKCSDGWWRGSYNGQIGWFPSNYVLEEVDEAAAESPSFLSLRKGASLSNGQGSRVLHVVQTLYPFSSVTEEELNFEKGETMEVIEKPENDPEWWKCKNARGQVGLVPKNYVVVLSDGPALHPAHAPQISYTGPSSSGRFAGREWYYGNVTRHQAECALNERGVEGDFLIRDSESSPSDFSVSLKASGKNKHFKVQLVDNVYCIGQRRFHTMDELVEHYKKAPIFTSEHGEKLYLVRALQ

SEQ ID NO: 1130 - protein, 456 aa, Homo Sapiens
MKIEEVKSTTKTQRIASHSHVKGLGLDESGLAKQAASGLVGQENAREACGVIVELIKSKKMAGRAVLLAGPPGTGKTALALAIAQELGSKVPFCPMVGSEVYSTEIKKTEVLMENFRRAIGLRIKETKEVYEGEVTELTPCETENPMGGYGKTISHVIIGLKTAKGTKQLKLDPSIFESLQKERVEAGDVIYIEANSGAVKRQGRCDTYATEFDLEAEEYVPLPKGDVHKKKEIIQDVTLHDLDVANARPQGGQDILSMMGQLMKPKKTEITDKLRGEINKVVNKYIDQGIAELVPGVLFVDEVHMLDIECFTYLHRALESSIAPIVIFASNRGNCVIRGTEDITSPHGIPLDLLDRVMIIRTMLYTPQEMKQIIKIRAQTEGINISEEALNHLGEIGTKTTLRYSVQLLTPANLLAKINGKDSIEKEHVEEISELFYDAKSSAKILADQQDKYMK

SEQ ID NO: 1131 - protein, 1139 aa, Homo Sapiens
MQTPEVPAERSPRRRSISGTSTSEKPNSMDTANTSPFKVPGFFSKRLKGSIKRTKSQSKLDRNTSFRLPSLRSTDDRSRGLPKLKESRSHESLLSPCSTVECLDLGRGEPVSVKPLHSSILGQDFCFEVTYLSGSKCFSCNSASERDKWMENLRRTVQPNKDNCRRAENVLRLWIIEAKDLAPKKKYFCELCLDDTLFARTTSKTKADNIFWGEHFEFFSLPPLHSITVHIYKDVEKKKKKDKNNYVGLVNIPTASVTGRQFVEKWYPVSTPTPNKGKTGGPSIRIKSRFQTITILPMEQYKEFAEFVTSNYTMLCSVLEPVISVRNKEELACALVHILQSTGRAKDFLTDLVMSEVDRCGEHDVLIFRENTIATKSIEEYLKLVGQQYLHDALGEFIKALYESDENCEVDPSKCSSSELIDHQSNLKMCCELAFCKIINSYCVFPRELKEVFASWKQQCLNRGKQDISERLISASLFLRFLCPAIMSPSLFNLMQEYPDDRTSRTLTLIAKVIQNLANFAKFGNKEEYMAFMNDFLEHEWGGMKRFLLEISNPDTISNTPGFDGYIDLGRELSVLHSLLWEVVSQLDKGENSFLQATVAKLGPLPRVLADITKSLTNPTPIQQQLRRFTEHNSSPNVSGSLSSGLQKIFEDPTDSDLHKLKSPSQDNTDSYFRGKTLLLVQQASSQSMTYSEKDERESSLPNGRSVSLMDLQDTHAAQVEHASVMLDVPIRLTGSQLSITQVASIKQLRETQSTPQSAPQVRRPLHPALNQPGGLQPLSFQNPVYHLNNPIPAMPKASIDSSLENLSTASSRSQSNSEDFKLSGPSNSSMEDFTKRSTQSEDFSRRHTVPDRHIPLALPRQNSTGQAQIRKVDQGGLGARAKAPPSLPHSASLRSTGSMSVVSAALVAEPVQNGSRSRQQSSSSRESPVPKVRAIQRQQTQQVQSPVDSATMSPVERTAAWVLNNGQYEEDVEETEQNLDEAKHAEKYEQEITKLKERLRVSSRRLEEYERRLLVQEQQMQKLLLEYKARLEDSEERLRRQQEEKDSQMKSIISRLMAVEEELKKDHAEMQAVIDAKQKIIDAQEKRIVSLDSANTRLMSALTQVKERYSMQVRNGISPTNPTKLSITENGEFKNSSC

SEQ ID NO: 1132 - protein, 356 aa, Homo Sapiens
MHHQWLLLAACFWVIFMFMVASKFITLTFKDPDVYSAKQEFLFLTTMPEVRKLPEEKHIPEELKPTGKELPDSQLVQPLVYMERLELIRNVCRDDALKNLSHTPVSKFVLDRIFVCDKHKILFCQTPKVGNTQWKKVLIVLNGAFSSIEEIPENVVHDHEKNGLPRLSSFSDAEIQKRLKTYFKFFIVRDPFERLISAFKDKFVHNPRFEPWYRHEIAPGIIRKYRRNRTETRGIQFEDFVRYLGDPNHRWLDLQFGDHIIHWVTYVELCAPCEIMYSVIGHHETLEDDAPYILKEAGIDHLVSYPTIPPGITVYNRTKVEHYFLGISKRDIRRLYARFEGDFKLFGYQKPDFLLN

SEQ ID NO: 1133 - protein, 673 aa, Homo Sapiens
MGGLASGGDVEPGLPVEVRGSNGAFYKGFVKDVHEDSVTIFFENNWQSERQIPFGDVRLPPPADYNKEITEGDEVEVYSRANEQEPCGWWLARVRMMKGDFYVIEYAACDATYNEIVTLERLRPVNPNPLATKGSFFKVTMAVPEDLREACSNENVHKEFKKALGANCIFLNITNSELFILSTTEAPVKRASLLGDMHFRSLRTKLLLMSRNEEATKHLETSKQLAAAFQEEFTVREDLMGLAIGTHGANIQQARKVPGVTAIELGEETCTFRIYGETPEACRQARSYLEFSEDSVQVPRNLVGKVIGKNGKVIQEIVDKSGVVRVRVEGDNDKKNPREEGMVPFIFVGTRENISNAQALLEYHLSYLQEVEQLRLERLQIDEQLRQIGLGFRPPGSGRGSGGSDKAGYSTDESSSSSLHATRTYGGSYGGRGRGRRTGGPAYGPSSDVSTASETESEKREEPNRAGPGDRDPPTRGEESRRRPTGGRGRGPPPAPRPTSRYNSSSISSVLKDPDSNPYSLLDTSEPEPPVDSEPGEPPPASARRRRSRRRRTDEDRTVMDGGLESDGPNMTENGLEDESRPQRRNRSRRRRNRGNRTDGSISGDRQPVTVADYISRAESQSRQRPPLERTKPSEDSLSGQKGDSVSKLPKGPSENGELSAPLELGSMVNGVS

SEQ ID NO: 1134 - protein, 466 aa, Homo Sapiens
MPYEIKKVFASLPQVERGVSKIIGGDPKGNNFLYTNGKCVILRNIDDHSRFVNCVRFSPDGNRFATASADGQIYIYDGKTGEKVCALGGSKAHDGGIYAISWSPDSTHLLSASGDKTSKIWDVSVNSVVSTFPMGSTVLDQQLGCLWQKDHLLSVSLSGYINYLDRNNPSKPLHVIKGHSKSIQCLTVHKNGGKSYIYSGSHDGHINYWDSETGENDSFAGKGHTNQVSRMTVDESGQLISCSMDDTVRYTSLMLRDYSGQGVVKLDVQPKCVAVGPGGYAVVVCIGQIVLLKDQRKCFSIDNPGYEPEVVAVHPGGDTVAIGGVDGNVRLYSILGTTLKDEGKLLEAKGPVTDVAYSHDGAFLAVCDASKVVTVFSVADGYSENNVFYGHHAKIVCLAWSPDNEHFASGGMDMMVYVWTLSDPETRVKIQDAHRLHHVSSLAWLDEHTLVTTSHDASVKEWTITY

SEQ ID NO: 1135 - protein, 196 aa, Homo Sapiens
EQCGGCRRANTTDRPHAFQVILSDRPCLELSAESEAEMAEWMQHLCQAVSKGVIPQGVAPSPCIPCCLVLTDDRLFTCHEDCQTSFFRSLGTAKLGDISAVSTEPGKEYCVLEFSQDSQQLLPPWVIYLSCTSELDRLLSALNSGWKTIYQVDLPHTAIQEASNKKKFEDALSLIHSAWQRSDSLCRGRASRDPWC

SEQ ID NO: 1136 - protein, 350 aa, Homo Sapiens [sequence omitted]

SEQ ID NO: 1137 - protein, 1393 aa, Homo Sapiens
MLSRPKPGESEVDLLHFQSQFLAAGAAPAVQLVKKGNRGGGDANSDRPPLQDHRDVVMLDNLPDLPPALVPSPPKRARPSPGHCLPEDEDPEERLRRHDQHITAVLTKIIERDTSSVAVNLPVPSGVAFPAVFLRSRDTQGKSATSGKRSIFAQEIAARRIAEAKGPSVGEVVPNVGPPEGAVTCETPTPRNQGCQLPGSSHSFQGPNLVTGKGLRDQEAEQEAQTIHEENIARLQAMAPEEILQEQQRLLAQLDPSLVAFLRSHSHTQEQTGETASEEQRPGGPSANVTKEEPLMSAFASEPRKRDKLEPEAPALALPVTPQKEWLHMDTVELEKLHWTQDLPPVRRQQTQERMQARFSLQGELLAPDVDLPTHLGLHHHGEEAERAGYSLQELFHLTRSQVSQQRALALHVLAQVISRAQAGEFGDRLAGSVLSLLLDAGFLFLLRFSLDDRVDGVIATAIRALRALLVAPGDEELLDSTFSWYHGALTFPLMPSQEDKEDEDEDEECPAGKAKRKSPEEESRPPPDLARHDVIKGLLATSLLPRLRYVLEVTYPGPAVVLDILAVLIRLARHSLESATRVLECPRLIETIVREFLPTSWSPVGAGPTPSLYKVPCATAMKLLRVLASAGRNIAARLLSSFDLRSRLCRIIAEAPQELALPPEEAEMLSTEALRLWAVAASYGQGGYLYRELYPVLMRALQVVPRELSTHPPQPLSMQRIASLLTLLTQLTLAAGSTPAETISDSAEASLSATPSLVTWTQVSGLQPLVEPCLRQTLKLLSRPEMWRAVGPVPVACLLFLGAYYQAWSQQPSSCPEDWLQDMQRLSEELLLPLLSQPTLGSLWDSLRHCSLLCNPLSCVPALEAPPSLVSLGCSGGCPRLSLAGSASPFPFLTALLSLLNTLAQIHKGLCGQLAAILAAPGLQNYFLQCVAPGAAPHLTPFSAWALRHEYHLQYLALALAQKAAALQPLPATHAALYHGMALALLSRLLPGSEYLTHELLLSCVFRLEFLPERTSGGPEAADFSDQLSLGSSRVPRCGQGTLLAQACQDLPSIRNCYLTHCSPARASLLASQALHRGELQRVPTLLLPMPTEPLLPTDWPFLPLIRLYHRASDTPSGLSPTDTMGTAMRVLQWVLVLESWRPQALWAVPPAARLARLMCVFLVDSELFRESPVQHLVAALLAQLCQPQVLPNLNLDCRLPGLTSFPDLYANFLDHFEAVSFGDHLFGALVLLPLQRRFSVTLRLALFGEHVGALRALSLPLTQLPVSLECYTVPPEDNLALLQLYFRTLVTGALRPRWCPVLYAVAVAHVNSFIFSQDPQSSDEVKAARRSMLQKTWLLADEGLRQHLLHYKLPNSTLPEGFELYSQLPPLRQHYLQRLTSTVLQNGVSET

SEQ ID NO: 1138 - protein, 193 aa, Homo Sapiens
MARARQEGSSPEPVEGLARDGPRPFPLGRLVPSAVSCGLCEPGLAAAPAAPTLLPAAYLCAPTAPPAVTAALGGSRWPGGPRSRPRGPRPDGPQPSLSLAEQHLESPVPSAPGALAGGPTQAAPGVRGEEEQWAREIGAQLRRMADDLNAQYERRRQEEQQRHRPSPWRVLYNLIMGLLPLPRGHRAPEMEPN

SEQ ID NO: 1139 - protein, 311 aa, Homo Sapiens [sequence omitted]

SEQ ID NO: 1140 - protein, 505 aa, Homo Sapiens
MSRSYNDELQFLEKINKNCWRIKKGFVPNMQVEGVFYVNDALEKLMFEELRNACRGGGVGGFLPAMKQIGNVAALPGIVHRSIGLPDVHSGYGFAIGNMAAFDMNDPEAVVSPGGVGFDINCGVRLLRTNLDESDVQPVKEQLAQAMFDHIPVGVGSKGVIPMNAKDLEEALEMGVDWSLREGYAWAEDKEHCEEYGRMLQADPNKVSARAKKRGLPQLGTLGAGNHYAEIQVVDEIFNEYAAKKMGIDHKGQVCVMIHSGSRGLGHQVATDALVAMEKAMKRDKIIVNDRQLACARIASPEGQDYLKGMAAAGNYAWVNRSSMTFLTRQAFAKVFNTTPDDLDLHVIYDVSHNIAKVEQHVVDGKERTLLVHRKGSTRAFPPHHPLIAVDYQLTGQPVLIGGTMGTCSYVLTGTEQGMTETFGTTCHGAGRALSRAKSRRNLDFQDVLDKLADMGIAIRVASPKLVMEEAPESYKNVTDVVNTCHDAGISKKAIKLRPIAVIKG

SEQ ID NO: 1141 - protein, 1247 aa, Homo Sapiens
MSLFLRVVFSFTMFGDLFEEEYSTVSNNQYGKGKKLKTKALEPPAPREFTNLSGIRNQGGTCYLNSLLQTLHFTPEFREALFSLGPEELGLFEDKDKPDAKVRIIPLQLQRLFAQLLLLDQEAASTADLTDSFGWTSNEEMRQHDVQELNRILFSALETSLVGTSGHDLIYRLYHGTIVNQIVCKECKNVSERQEDFLDLTVAVKNVSGLEDALWNMYVEEEVFDCDNLYHCGTCDRLVKAAKSAKLRKLPPFLTVSLLRFNFDFVKCERYKETSCYTFPLRINLKPFCEQSELDDLEYIYDLFSVIIHKGGCYGGHYHVYIKDVDHLGNWQFQEEKSKPDVNLKDLQSEEEIDHPLMILKAILLEENNLIPVDQLGQKLLKKIGISWNKKYRKQHGPLRKFLQLHSQIFLLSSDESTVRLLKNSSLQAESDFQRNDQQIFKMLPPESPGLNNSISCPHWFDINDSKVQPIREKDIEQQFQGKESAYMLFYRKSQLQRPPEARANPRYGVPCHLLNEMDAANIELQTKRAECDSANNTFELHLHLGPQYHFFNGALHPVVSQTESVWDLTFDKRKTLGDLRQSIFQLLEFWEGDMVLSVAKLVPAGLHIYQSLGGDELTLCETEIADGEDIFVWNGVEVGGVHIQTGIDCEPLLLNVLHLDTSSDGEKCCQVIESPHVFPANAEVGTVLTALAIPAGVIFINSAGCPGGEGWTAIPKEDMRKTFREQGLRNGSSILIQDSHDDNSLLTKEEKWVTSMNEIDWLHVKNLCQLESEEKQVKISATVNTMVFDIRIKAIKELKLMKELADNSCLRPIDRNGKLLCPVPDSYTLKEAELKMGSSLGLCLGKAPSSSQLFLFFAMGSDVQPGTEMEIVVEETISVRDCLKLMLKKSGLQGDAWHLRKMDWCYEAGEPLCEEDATLKELLICSGDTLLLIEGQLPPLGFLKVPIWWYQLQGPSGHWESHQDQTNCTSSWGRVWRATSSQGASGNEPAQVSLLYLGDIEISEDATLAELKSQAMTLPPFLEFGVPSPAHLRAWTVERKRPGRLLRTDRQPLREYKLGRRIEICLEPLQKGENLGPQDVLLRTQVRIPGERTYAPALDLVWNAAQGGTAGSLRQRVADFYRLPVEKIEIAKYFPEKFEWLPISSWNQQITKRKKKKKQDYLQGAPYYLKDGDTIGVKNLLIDDDDDFSTIRDDTGKEKQKQRALGRRKSQEALHEQSSYILSSAETPARPRAPETSLSIHVGSFR

SEQ ID NO: 1142 - protein, 826 aa, Homo Sapiens
MWALCSLLRSAAGRTMSQGRTISQAPARRERPRKDPLRHLRTREKRGPSGCSGGPNTVYLQVVAAGSRDSGAALYVFSEFNRYLFNCGEGVQRLMQEHKLKVARLDNIFLTRMHWSNVGGLSGMILTLKETGLPKCVLSGPPQLEKYLEAIKIFSGPLKGIELAVRPHSAPEYEDETMTVYQIPIHSEQRRGKHQPWQSPERPLSRLSPERSSDSESNENEPHLPHGVSQRRGVRDSSLVVAFICKLHLKRGNFLVLKAKEMGLPVGTAAIAPIIAAVKDGKSITHEGREILAEELCTPPDPGAAFVVVECPDESFIQPICENATFQRYQGKADAPVALVVHMAPASVLVDSRYQQWMERFGPDTQHLVLNENCASVHNLRSHKIQTQLNLIHPDIFPLLTSFRCKKEGPTLSVPMVQGECLLKYQLRPRREWQRDAIITCNPEEFIVEALQLPNFQQSVQEYRRSAQDGPAPAEKRSQYPEIIFLGTGSAIPMKIRNVSATLVNISPDTSLLLDCGEGTFGQLCRHYGDQVDRVLGTLAAVFVSHLHADHHTGLPSILLQRERALASLGKPLHPLLVVAPNQLKAWLQQYHNQCQEVLHHISMIPAKCLQEGAEISSPAVERLISSLLRTCDLEEFQTCLVRHCKHAFGCALVHTSGWKVVYSGDTMPCEALVRMGKDATLLIHEATLEDGLEEEAVEKTHSTTSQAISVGMRMNAEFIMLNHFSQRYAKVPLFSPNFSEKVGVAFDHMKVCFGDFPTMPKLIPPLKALFAGDIEEMEERREKRELRQVRAALLSRELAGGLEDGEPQQKRAHTEEPQAKKVRAQ

SEQ ID NO: 1143 - protein, 544 aa, Homo Sapiens
MMTGQTMSERGTKKRKRRRRRSPRRRSIWTMRKEGSERKRRSGSERGSTVTRRERLTTLILGRRWRWSRPQIGQSERAGHSQPKMRAHLFSNSWNTSSASFRDPHGFFAFPVTDAIAPGYSMIIKHPMDFGTMKDKIVANEYKSVTEFKADFKLMCDNAMTYNRPDTVYYKLAKKILHAGFKMMSKQAALLGNEDTAVEEPVPEVVPVQVETAKKSKKPSREVISCMFEPEGNACSLTDSTAEEHVLALVEHAADEARDRINRFLPGGKMGYLKRNGDGSLLYSVVNTAEPDADEEETHPVDLSSLSSKLLPGFTTLGFKDERRNKVTFLSSATTALSMQNNSVFGDLKSDEMELLYSAYGDETGVQCALSLQEFVKDAGSYSKKVVDDLLDQITGGDHSRTLFQLKQRRNVPMKPPDEAKVGDTLGDSSSSVLEFMSMKSYPDVSVDISMLSSLGKVKKELDPDDSHLNLDETTKLLQDLHEAQAERGGSRPSSNLSSLSNASERDQHHLGSPSRLSVGEQPDVTHDPYEFLQSPEPAASAKT

SEQ ID NO: 1144 - protein, 200 aa, Homo Sapiens
MDDKKKKRSPKPCLAQPAQAPGTLRRVPVPTSHSGSLALGLPHLPSPKQRAKFKRVGKEKCRPVLAGGGSGSAGTPLQHSFLTEVTDVYEMEGGLLNLLNDFHSGRLQAFGKECSFEQLEHVREMQEKLARLHFSLDVCGEEEDDEEEEDGVTEGLPEEQKKTMADRNLDQLLSNLEDLSNSIQKLHLAENAEPEEQSAA

SEQ ID NO: 1145 - protein, 496 aa, Homo Sapiens
MEEQREALRKIIKTLAVKNEEIQSFIYSLKQMLLNVEANSAKVQEDLEAEFQSLFSLLEELKEGMLMKIKQDRASRTYELQNQLAACTRALESSEELLETANQTLQAMDSEDFPQAAKQIKDGVTMAPAFRLSLKAKVSDNMSHLMVDFAQERQMLQALKFLPVPSAPVIDLAESLVADNCVTLVWRMPDEDSKIDHYVLEYRRTNFEGPPRLKEDQPWMVIEGIRQTEYTLTGLKFDMKYMNFRVKACNKAVAGEFSEPVTLETPAFMFRLDASTSHQNLRVDDLSVEWDAMGGKVQDIKAREKDGKGRTASPINSPARGTPSPKRMPSGRGGRDRFTAESYTVLGDTLIDGGEHYWEVRYEPDSKAFGVGVAYRSLGRFEQLGKTAASWCLHVNNWLQVSFTAKHANKVKVLDAPVPDCLGVHCDFHQGLLSFYNARTKQVLHTFKTRFTQPLLPAFTVWCGSFQVTTGLQVPSAVRCLQKRGSATSSSNTSLT

SEQ ID NO: 1146 - protein, 104 aa, Homo Sapiens
MSYLAFLYMTFDFCCLYFSTVYAPSFKYICVHTDTHICVCVCIYLSSVVSKSSAEADGVLQPRRHPASLLIVFATSISESSLLIFSFQKTEAKLIVFAVSLAAK

SEQ ID NO: 1147 - protein, 852 aa, Homo Sapiens
MSSVSPIQIPSRLPLLLTHEGVLLPGSTMRTSVDSARNLQLVRSRLLKGTSLQSTILGVIPNTPDPASDAQDLPPLHRIGTAALAVQVVGSNWPKPHYTLLITGLCRFQIVQVLKEKPYPIAEVEQLDRLEEFPNTCKMREELGELSEQFYKYAVQLVEMLDMSVPAVAKLRRLLDSLPREALPDILTSIIRTSNKEKLQILDAVSLEERFKMTIPLLVRQIEGLKLLQKTRKPKQDDDKRVIAIRPIRRITHISGTLEDEDEDEDNDDIVMLEKKIRTSSMPEQAHKVCVKEIKRLKKMPQSMPEYALTRNYLELMVELPWNKSTTDRLDIRAARILLDNDHYAMEKLKKRVLEYLAVRQLKNNLKGPILCFVGPPGVGKTSVGRSVAKTLGREFHRIALGGVCDQSDIRGHRRTYVGSMPGRIINGLKTVGVNNPVFLLDEVDKLGKSLQGDPAAALLEVLDPEQNHNFTDHYLNVAFDLSQVLFIATANTTATIPAALLDRMEIIQVPGYTQEEKIEIAHRHLIPKQLEQHGLTPQQIQIPQVTTLDIITRYTREAGVRSLDRKLGAICRAVAVKVAEGQHKEAKLDRSDVTEREGCREHILEDEKPESISDTTDLALPPEMPILIDFHALKDILGPPMYEMEVSQRLSQPGVAIGLAWTPLGGEIMFVEASRMDGEGQLTLTGQLGDVMKESAHLAISWLRSNAKKYQLTNAFGSFDLLDNTDIHLHFPAGAVTKDGPSAGVTIVTCLASLFSGRLVRSDVAMTGEITLRGLVLPVGGIKDKVLAAHRAGLKQVIIPRRNEKDLEGIPGNVRQDLSFVTASCLDEVLNAAFDGGFTVKTRPGLLNSKL

SEQ ID NO: 1148 - protein, 1205 aa, Homo Sapiens
MTKKEEPPPSRVPRAVRVASLLSEGEELSGDDQGDEEEDDHAYEGVPNGGWHTSSLSLSLPSTIAAPHPMDGPPGGSTPVTPVIKAGWLDKNPPQGSYIYQKRWVRLDTDHLRYFDSNKDAYSKRFISVACISHVAAIGDQKFEVITNNRTFAFRAESDVERKEWMQALQQAMAEQRARARLSSAYLLGVPGSEQPDRAGSLELRGFKNKLYVAVVGDKVQLYKNLEEYHLGIGITFIDMSVGNVKEVDRRSFDLTTPYRIFSFSADSELEKEQWLEAMQGAIAEALSTSEVAERIWAAAPNRFCADCGAPQPDWASINLCVVICKRCAGEHRGLGAGVSKVRSLKMDRKVWTETLIELFLQLGNGAGNRFWAANVPPSEALQPSSSPSTRRCHLEAKYREGKYRRYHPLFGNQEELDKALCAAVTTTDLAETQALLGCGAGINCFSGDPEAPTPLALAEQAGQTLQMEFLRNNRTTEVPRLDSMKPLEKHYSVVLPTVSHSGFLYKTASAGKLLQDRRAREEFSRRWCVLGDGVLSYFENERAVTPNGEIRASEIVCLAVPPPDTHGFEHTFEVYTEGERLYLFGLESAEQAHEWVKCIAKAFVPPLAEDLLARDFERLGRLPYKAGLSLQRAQEGWFSLSGSELRAVFPEGPCEEPLQLRKLQELSIQGDSENQVLVLVERRRTLYIQGERRLDFMGWLGAIQKAAASMGDTLSEQQLGDSDIPVIVYRCVDYITQCGLTSEGIYRKCGQTSKTQRLLESLRQDARSVHLKEGEQHVDDVSSALKRFLRDLPDGLFTRAQRLTWLEASEIEDEEEKVSRYRELLVRLPPVNRATVKALISHLYCVQCFSDTNQMNVHNLAIVFGPTLFQTDGQDYKAGRVVEDLINHYVVVFSVDEEELRKQREEITAIVKMRVAGTASGTQHAGDFICTVYLEEKKAETEQHIKVPASMTAEELTLEILDRRNVGIREKDYWTCFEVNEREEAERPLHFAEKVLPILHGLGTDSHLVVKKHQAMEAMLLYLASRVGDTKHGMMKFREDRSLLGLGLPSGGFHDRYFILNSSCLRLYKEVRSQRPWSGAPETSHRPEKEWPIKSLKVYLGVKKKLRPPTCWGFTVVHETEKHEKQQWYLCCDTQMELREWFATFLFVQHDGLVWPSEPSRVSRAVPEVRLGSVSLIPLRGSENEMRRSVAAFTADPLSLLRNV

SEQ ID NO: 1149 - protein, 118 aa, Homo Sapiens
MVARVWSLMRFLIKGSVAGGAVYLVYDQELLGPSDKSQAALQKAGEVVPPAMYQFSQYVCQQTGLQIPQLPAPPKIYFPIRDSWNAGIMTVMSALSVAPSKAREYSKEGWEYVKARTK

SEQ ID NO: 1150 - protein, 885 aa, Homo Sapiens
MSHPDYRMNLRPLGTPRGVSAVAGPHDIGASPGDKKSKNRSTRGKKKSIFETYMSKEDVSEGLKRGTLIQGVLRINPKKFHEAFIPSPDGDRDIFIDGVVARNRALNGDLVVVKLLPEEHWKVVKPESNDKETEAAYESDIPEELCGHHLPQQSLKSYNDSPDVIVEAQFDGSDSEDGHGITQNVLVDGVKKLSVCVSEKGREDGDAPVTKDETTCISQDTRALSEKSLQRSAKVVYILEKKHSRAATGFLKLLADKNSELFRKYALFSPSDHRVPRIYVPLKDCPQDFVARPKDYANTLFICRIVDWKEDCNFALGQLAKSLGQAGEIEPETEGILTEYGVDFSDFSSEVLECLPQGLPWTIPPEEFSKRRDLRKDCIFTIDPSTARDLDDALSCKPLADGNFKVGVHIADVSYFVPEGSDLDKVAAERATSVYLVQKVVPMLPRLLCEELCSLNPMSDKLTFSVIWTLTPEGKILDEWFGRTIIRSCTKLSYEHAQSMIESPTEKIPAKELPPISPEHSSEEVHQAVLNLHGIAKQLRQQRFVDGALRLDQLKLAFTLDHETGLPQGCHIYEYRESNKLVEEFMLLANMAVAHKIHRAFPEQALLRRHPPPQTRMLSDLVEFCDQMGLPVDFSSAGALNKSLTQTFGDDKYSLARKEVLTNMCSRPMQMALYFCSGLLQDPAQFRHYALNVPLYTHFTSPIRRFADVLVHRLLAAALGYRERLDMAPDTLQKQADHCNDRRMASKRVQELSTSLFFAVLVKESGPLESEAMVMGILKQAFDVLVLRYGVQKRIYCNALALRSHHFQKVGKKPELTLVWEPEDMEQEPAQQVITIFSLVEVVLQAESTALKYSAILKRPGTQGHLGPEKEEEESDGEPEDSSTS

SEQ ID NO: 1151 - protein, 323 aa, Homo Sapiens
MAAARPEAQSRSSPTPESRSQEPLDLVLVPDDCRPGTPPSDLIEIQVVKVTDTTLVPEPPEPGSFHCALCPAAFRLVSELLFHEHGHLAGAEGGGQGGDPSRCHVCGHSCPGPASLRAHYSLHTGERPYRCALCPRAFKALAPLLRHQHRHGVEPGTSRRPPDTAAVAEQRPGVAPERAEVVMAAAAAGAAVGKPFACRFCAKPFRRSSDMRDHERVHTGERPYHCGICGKGFTQSSVLSGHARIHTGERPFRCTLCDRTFNNSSNFRKHQRTHFHGPGPGLGDSGGQLGSSAAEGSGSGCGVGDPAEEGRGETAKVKVEADQ

SEQ ID NO: 1152 - protein, 322 aa, Homo Sapiens
MKRPGPCDSSRDSTSQVLRDLRGRESWAGDRRAQPTPSPRERASPSSPPSQPPPGPLPLLLVSLVQARVPEHENELHSGDYAPPGSSVEIAKIFQADVVPRLQEGAVIVLGSTAHAVLAAPPYSIIKTSETENPCILELMDDVLYEAVEELRLRLIKFGETKFNVTEPKEPGESVVIRIPVIHQGDTSKVSIRQEALCSDGGRESVGATLLLWTPTCPRRGRAQTRRRGRHVGQRGPLPWKRRARAPGKGCYAQDRVLTVEERTSAGYHAVRQKAGRLRSQSSGSAAQAAGRGSLEAGIRPEGVFLEFLSSVPQKAHTSYEI

SEQ ID NO: 1153 - protein, 323 aa, Homo Sapiens
MDSKYQCVKLNDGHFMPVLGFGTYAPAEVPKSKALEAVKLAIEAGFHHIDSAHVYNNEEQVGLAIRSKIADGSVKREDIFYTSKLWSNSHRPELVRPALERSLKNLQLDYVDLYLIHFPVSVKPGEEVIPKDENGKILFDTVDLCATWEAMEKCKDAGLAKSIGVSNFNHRLLEMILNKPGLKYKPVCNQVECHPYFNQRKLLDFCKSKDIVLVAYSALGSHREEPWVDPNSPVLLEDPVLCALAKKHKRTPALIALRYQLQRGVVVLAKSYNEQRIRQNVQVFEFQLTSEEMKAIDGLNRNVRYLTLDIFAGPPNYPFSDEY

SEQ ID NO: 1154 - protein, 1270 aa, Homo Sapiens
MGDVKNFLYAWCGKRKMTPSYEIRAVGNKNRQKFMCEVQVEGYNYTGMGNSTNKKDAQSNAARDFVNYLVRINEIKSEEVPAFGVASPPPLTDTPDTTANAEGDLPTTMGGPLPPHLALKAENNSEVGASGYGVPGPTWDRGANLKDYYSRKEEQEVQATLESEEVDLNAGLHGNWTLENAKARLNQYFQKEKIQGEYKYTQVGPDHNRSFIAEMTIYIKQLGRRIFAREHGSNKKLAAQSCALSLVRQLYHLGVVEAYSGLTKKKEGETVEPYKVNLSQDLEHQLQNIIQELNLEILPPPEDPSVPVALNIGKLAQFEPSQRQNQVGVVPWSPPQSNWNPWTSSNIDEGPLAFATPEQISMDLKNELMYQLEQDHDLQAILQERELLPVKKFESEILEAISQNSVVIIRGATGCGKTTQVPQFILDDFIQNDRAAECNIVVTQPRRISAVSVAERVAFERGEEPGKSCGYSVRFESILPRPHASIMFCTVGVLLRKLEAGIRGISHVIVDEIHERDINTDFLLVVLRDVVQAYPEVRIVLMSATIDTSMFCEYFFNCPIIEVYGRTYPVQEYFLEDCIQMTHFVPPPKDKKKKDKDDDGGEDDDANCNLICGDEYGPETRLSMSQLNEKETPFELIEALLKYIETLNVPGAVLVFLPGWNLIYTMQKHLEMNPHFGSHRYQILPLHSQIPREEQRKVFDPVPVGVTKVILSTNIAETSITINDVVYVIDSCKQKVKLFTAHNNMTNYATVWASKTNLEQRKGRAGRVRPGFCFHLCSRARFERLETHMTPEMFRTPLHEIALSIKLLRLGGIGQFLAKAIEPPPLDAVIEAEHTLRELDALDANDELTPLGRILAKLPIEPRFGKMMIMGCIFYVGDAICTIAAATCFPEPFINEGKRLGYIHRNFAGNRFSDHVALLSVFQAWDDARMGGEEAEIRFCEHKRLNMATLRMTWEAKVQLKEILINSGFPEDCLLTQVFTNTGPDNNLDVVISLLAFGVYPNVCYHKEKRKILTTEGRNALIHKSSVNCPFSSQDMKYPSPFFVFGEKIRTRAISAKGMTLVTPLQLLLFASKKVQSDGQIVLVDDWIKLQISHEAAACITGLRAAMEALVVEVTKQPAIISQLDPVNERMLNMIRQISRPSAAGINLMIGSTRYGDGPRPPKMARYDNGSGYRRGGSSYSGGGYGGGYSSGGYGSGGYGGSANSFRAGYGAGVGGGYRGVSRGGFRGNSGGDYRGPSGGYRGSGGFQRGGGRGAYGTGYFGQGRGGGGY

SEQ ID NO: 1155 - protein, 222 aa, Homo Sapiens
MAEKPKLHYFNARGRMESTRWLLAAAGVEFEEKFIKSAEDLDKLRNDGYLMFQQVPMVEIDGMKLVQTRAILNYIASKYNLYGKDIKERALIDMYIEGIADLGEMILLLPVCPPEEKDAKLALIKEKIKNRYFPAFEKVLKSHGQDYLVGNKLSRADIHLVELLYYVEELDSSLISSFPLLKALKTRISNLPTVKKFLQPGSPRKPPMDEKSLEEARKIFRF

SEQ ID NO: 1156 - protein, 194 aa, Homo Sapiens
MAASLVGKKIVFVTGNAKKLEEVVQILGDKFPCTLVAQKIDLPEYQGEPDEISIQKCQEAVRQVQGPVLVEDTCLCFNALGGLPGPYIKWFLEKLKPEGLHQLLAGFEDKSAYALCTFALSTGDPSQPVRLFRGRTSGRIVAPRGCQDFGWDPCFQPDGYEQTYAEMPKAEKNAVSHRFRALLELQEYFGSLAA

SEQ ID NO: 1157 - protein, 275 aa, Homo Sapiens
MPYANQPTVRITELTDENVKFIIENTDLAVANSIRRVFIAEVPIIAIDWVQIDANSSVLHDEFIAHRLGLIPLISDDIVDKLQYSRDCTCEEFCPECSVEFTLDVRCNEDQTRHVTSRDLISNSPRVIPVTSRNRDNDPNDYVEQDDILIVKLRKGQELRLRAYAKKGFGKEHAKWNPTAGVAFEYDPDNALRHTVYPKPEEWPKSEYSELDEDESQAPYDPNGKPERFYYNVESCGSLRPETIVLSALSGLKKKLSDLQTQLSHEIQSDVLTIN

SEQ ID NO: 1158 - protein, 1230 aa, Homo Sapiens
MSALCWGRGAAGLKRALRPCGRPGLPGKEGTAGGVCGPRRSSSASPQEQDQDRRKDWGHVELLEVLQARVRQLQAESVSEVVVNRVDVARLPECGSGDGSLQPPRKVQMGAKDATPVPCGRWAKILEKDKRTQQMRMQRLKAKLQMPFQSGEFKALTRRLQVEPRLLSKQMAGCLEDCTRQAPESPWEEQLARLLQEAPGKLSLDVEQAPSGQHSQAQLSGQQQRLLAFFKCCLLTDQLPLAHHLLVVHHGQRQKRKLLTLDMYNAVMLGWARQGAFKELVYVLFMVKDAGLTPDLLSYAAALQCMGRQDQDAGTIERCLEQMSQEGLKLQALFTAVLLSEEDRATVLKAVHKVKPTFSLPPQLPPPVNTSKLLRDVYAKDGRVSYPKLHLPLKTLQCLFEKQLHMELASRVCVVSVEKPTLPSKEVKHARKTLKTLRDQWEKALCRALRETKNRLEREVYEGRFSLYPFLCLLDEREVVRMLLQVLQALPAQGESFTTLARELSARTFSRHVVQRQRVSGQVQALQNHYRKYLCLLASDAEVPEPCLPRQYWEELGAPEALREQPWPLPVQMELGKLLAEMLVQATQMPCSLDKPHRSSRLVPVLYHVYSFRNVQQIGILKPHPAYVQLLEKAAEPTLTFEAVDVPMLCPPLPWTSPHSGAFLLSPTKLMRTVEGATQHQELLETCPPTALHGALDALTQLGNCAWRVNGRVLDLVLQLFQAKGCPQLGVPAPPSEAPQPPEAHLPHSAAPARKAELRRELAHCQKVAREMHSLRAEALYRLSLAQHLRDRVFWLPHNMDFRGRTYPCPPHFNHLGSDVARALLEFAQGRPLGPHGLDWLKIHLVNLTGLKKREPLRKRLAFAEEVMDDILDSADQPLTGRKWWMGAEEPWQTLACCMEVANAVRASDPAAYVSHLPVHQDGSCNGLQHYAALGRDSVGAASVNLEPSDVPQDVYSGVAAQVEVFRRQDAQRGMRVAQVLEGFITRKVVKQTVMTVVYGVTRYGGRLQIEKRLRELSDFPQEFVWEASHYLVRQVFKSLQEMFSGTRAIQHWLTESARLISHMGSVVEWVTPLGVPVIQPYRLDSKVKQIGGGIQSITYTHNGDISRKPNTRKQKNGFPPNFIHSLDSSHMMLTALHCYRKGLTFVSVHDCYWTHAADVSVMNQVCREQFVRLHSEPILQDLSRFLVKRFCSEPQKILEASQLKETLQAVPKPGAFDLEQVKRSTYFFS

SEQ ID NO: 1159 - protein, 461 aa, Homo Sapiens [sequence omitted]

SEQ ID NO: 1160 - protein, 792 aa, Homo Sapiens
MHVIKRDGRQERVMFDKITSRIQKLCYGLNMDFVDPAQITMKVIQGLYSGVTTVELDTLAAETAATLTTKHPDYAILAARIAVSNLHKETKKVFSDVMEDLYNYINPHNGKHSPMVAKSTLDIVLANKDRLNSAIIYDRDFSYNYFGFKTLERSYLLKINGKVAERPQHMLMRVSVGIHKEDIDAAIETYNLLSERWFTHASPTLFNAGTNRPQLSSCFLLSMKDDSIEGIYDTLKQCALISKSAGGIGVAVSCIRATGSYIAGTNGNSNGLVPMLRVYNNTARYVDQGGNKRPGAFAIYLEPWHLDIFEFLDLKKNTGKEEQRARDLFFALWIPDLFMKRVETNQDWSLMCPNECPGLDEVWGEEFEKLYASYEKQGRVRKVVKAQQLWYAIIESQTETGTPYMLYKDSCNRKSNQQNLGTIKCSNLCTEIVEYTSKDEVAVCNLASLALNMYVTSEHTYDFKKLAEVTKVVVRNLNKIIDINYYPVPEACLSNKRHRPIGIGVQGLADAFILMRYPFESAEAQLLNKQIFETIYYGALEASCDLAKEQGPYETYEGSPVSKGILQYDMWNVTPTDLWDWKVLKEKIAKYGIRNSLLIAPMPTASTAQILGNNESIEPYTSNIYTRRVLSGEFQIVNPHLLKDLTERGLWHEEMKNQIIACNGSIQSIPEIPDDLKQLYKTVWEISQKTVLKMAAERGAFIDQSQSLNIHIAEPNYGKLTSMHFYGWKQGLKTGMYYLRTRPAANPIQFTLNKEKLKDKEKVSKEEEEKERNTAAMVCSLENRDECLMCGS

SEQ ID NO: 1161 - protein, 367 aa, Homo Sapiens
MEANGLGPQGFPELKNDTFLRAAWGEETDYTPVWCMRQAGRYLPEFRETRAAQDFFSTCRSPEACCELTLQPLRRFPLDAAIIFSDILVVPQALGMEVTMVPGKGPSFPEPLREEQDLERLRDPEVVASELGYVFQAITLTRQRLAGRVPLIGFAGAPWTLMTYMVEGGGSSTMAQAKRWLYQRPQASHQLLRILTDALVPYLVGQVVAGAQALQLFESHAGHLGPQLFNKFALPYIRDVAKQVKARLREAGLAPVPMIIFAKDGHFALEELAQAGYEVVGLDWTVAPKKARECVGKTVTLQGNLDPCALYASEEEIGQLVKQMLDDFGPHRYIANLGHGLYPDMDPEHVGAFVDAVHKHSRLLRQN

SEQ ID NO: 1162 - protein, 624 aa, Homo Sapiens
MQPDPRPSGAGACCRFLPLQSQCPEGAGDAVMYASTECKAEVTPSQHGNRTFSYTLEDHTKQAFGIMNELRLSQQLCDVTLQVKYQDAPAAQFMAHKVVLASSSPVFKAMFTNGLREQGMEVVSIEGIHPKVMERLIEFAYTASISMGEKCVLHVMNGAVMYQIDSVVRACSDFLVQQLDPSNAIGIANFAEQIGCVELHQRAREYIYMHFGEVAKQEEFFNLSHCQLVTLISRDDLNVRCESEVFHACINWVKYDCEQRRFYVQALLRAVRCHSLTPNFLQMQLQKCEILQSDSRCKDYLVKIFEELTLHKPTQVMPCRAPKVGRLIYTAGGYFRQSLSYLEAYNPSDGTWLRLADLQVPRSGLAGCVVGGLLYAVGGRNNSPDGNTDSSALDCYNPMTNQWSPCAPMSVPRNRIGVGVIDGHIYAVGGSHGCIHHNSVERYEPERDEWHLVAPMLTRRIGVGVAVLNRLLYAVGGFDGTNRLNSAECYYPERNEWRMITAMNTIRSGAGVCVLHNCIYAAGGYDGQDQLNSVERYDVETETWTFVAPMKHRRSALGITVHQGRIYVLGGYDGHTFLDSVECYDPDTDTWSEVTRMTSGRSGVGVAVTMEPCRKQIDQQNCTC

SEQ ID NO: 1163 - protein, 402 aa, Homo Sapiens
MPHSAGGTAGVGLEAAEPTALLTRAEPPSEPTEIRPQKRKKGPAPKMLGNELCSVCGDKASGFHYNVLSCEGCKGFFRRSVIKGAHYICHSGGHCPMDTYMRRKCQECRLRKCRQAGMREECVLSEEQIRLKKLKRQEEEQAHATSLPPRASSPPQILPQLSPEQLGMIEKLVAAQQQCNRRSFSDRLRVTPWPMAPDPHSREARQQRFAHFTELAIVSVQEIVDFAKQLPGFLQLSREDQIALLKTSAIEVMLLETSRRYNPGSESITFLKDFSYNREDFAKAGLQVEFINPIFEFSRAMNELQLNDAEFALLIAISIFSADRPNVQDQLQVERLQHTYVEALHAYVSIHHPHDRLMFPRMLMKLVSLRTLSSVHSEQVFALRLQDKKLPPLLSEIWDVHE

SEQ ID NO: 1164 - protein, 177 aa, Homo Sapiens
MEALILEPSLYTVKAILILDNDGDRLFAKYYDDTYPSVKEQKAFEKNIFNKTHRTDSEIALLEGLTVVYKSSIDLYFYVIGSSYENELMLMAVLNCLFDSLSQMLRKNVEKRALLENMEGLFLAVDEIVDGGVILESDPQQVVHRVALRGEDVPLTEQTVSQVLQSAKEQIKWSLLR

SEQ ID NO: 1165 - protein, 1842 aa, Homo Sapiens
MELMFAEWEDGERFSFEDSDRFEEDSLCSFISEAESLCQNWRGWRKQSAGPNSPTGGGGGGGSGGTRMRDGLVIPLVELSAKQVAFHIPFEVVEKVYPPVPEQLQLRIAFWSFPENEEDIRLYSCLANGSADEFQRGDQLFRMRAVKDPLQIGFHLSATVVPPQMVPPKGAYNVAVMFDRCRVTSCSCTCGAGAKWCTHVVALCLFRIHNASAVCLRAPVSESLSRLQRDQLQKFAQYLISELPQQILPTAQRLLDELLSSQSTAINTVCGAPDPTAGPSASDQSTWYLDESTLTDNIKKTLHKFCGPSPVVFSDVNSMYLSSTEPPAAAEWACLLRPLRGREPEGVWNLLSIVREMFKRRDSNAAPLLEILTDQCLTYEQITGWWYSVRTSASHSSASGHTGRSNGQSEVAAHACASMCDEMVTLWRLAVLDPALSPQRRRELCTQLRQWQLKVIENVKRGQHKKTLERLFPGFRPAVEACYFNWEEAYPLPGVTYSGTDRKLALCWARALPSRPGASRSGGLEESRDRPRPLPTEPAVRPKEPGTKRKGLGEGVPSSQRGPRRLSAEGGDKALHKMGPGGGKAKALGGAGSGSKGSAGGGSKRRLSSEDSSLEPDLAEMSLDDSSLALGAEASTFGGFPESPPPCPLHGGSRGPSTFLPEPPDTYEEDGGVYFSEGPEPPTASVGPPGLLPGDVCTQDDLPSTDESGNGLPKTKEAAPAVGEEDDDYQAYYLNAQDGAGGEEEKAEGGAGEEHDLFAGLKPLEQESRMEVLFACAEALHAHGYSSEASRLTVELAQDLLANPPDLKVEPPPAKGKKNKVSTSRQTWVATNTLSKAAFLLTVLSERPEHHNLAFRVGMFALELQRPPASTKALEVKLAYQESEVAALLKKIPLGPSEMSTMRCRAEELREGTLCDYRPVLPLMLASFIFDVLCAPVVSPTGSRPPSRNWNSETPGDEELGFEAAVAALGMKTTVSEAEHPLLCEGTRREKGDLALALMITYKDDQAKLKKILDKLLDRESQTHKPQTLSSFYSSSRPTTASQRSPSKHGGPSAPGALQPLTSGSAGPAQPGSVAGAGPGPTEGFTEKNVPESSPHSPCEGLPSEAALTPRPEGKVPSRLALGSRGGYNGRGWGSPGRPKKKHTGMASIDSSAPETTSDSSPTLSRRPLRGGWAPTSWGRGQDSDSISSSSSDSLGSSSSSGSRRASASGGARAKTVEVGRYKGRRPESHAPHVPNQPSEAAAHFYFELAKTVLIKAGGNSSTSIFTHPSSSGGHQGPHRNLHLCAFEIGLYALGLHNFVSPNWLSRTYSSHVSWITGQAMEIGSAALTILVECWDGHLTPPEVASLADRASRARDSNMVRAAAELALSCLPHAHALNPNEIQRALVQCKEQDNLMLEKACMAVEEAAKGGGVYPEVLFEVAHQWFWLYEQTAGGSSTAREGATSCSASGIRAGGEAGRGMPEGRGGPGTEPVTVAAAAVTAAATVVPVISVGSSLYPGPGLGHGHSPGLHPYTALQPHLPCSPQYLTHPAHPAHPMPHMPRPAVFPVPSSAYPQGVHPAFLGAQYPYSVTPPSLAATAVSFPVPSMAPITVHPYHTEPGLPLPTSVACELWGQGTVSSVHPASTFPAIQGASLPALTTQPSPLVSGGFPPPEEETHSQPVNPHSLHHLHAAYRVGMLALEMLGRRAHNDHPNNFSRSPPYTDDVKWLLGLAAKLGVNYVHQFCVGAAKGVLSPFVLQEIVMETLQRLSPAHAHNHLRAPAFHQLVQRCQQAYMQYIHHRLIHLTPADYDDFVNAIRSARSAFCLTPMGMMQFNDILQNLKRSKQTKELWQRVSLEMATFSP

SEQ ID NO: 1166 - protein, 472 aa, Homo Sapiens
MAGPGWGPPRLDGFILTERLGSGTYATVYKAYAKKDTREVVAIKCVAKKSLNKASVENLLTEIEILKGIRHPHIVQLKDFQWDSDNIYLIMEFCAGGDLSRFIHTRRILPEKVARVFMQQLASALQFLHERNISHLDLKPQNILLSSLEKPHLKLADFGFAQHMSPWDEKHVLRGSPLYMAPEMVCQRQYDARVDLWSMGVILYEALFGQPPFASRSFSELEEKIRSNRVIELPLRPLLSRDCRDLLQRLLERDPSRRISFQDFFAHPWVDLEHMPSGESLGRATALVVQAVKKDQEGDSAAALSLYCKALDFFVPALHYEVDAQRKEAIKAKVGQYVSRAEELKAIVSSSNQALLRQGTSARDLLREMARDKPRLLAALEVASAAMAKEEAAGGEQDALDLYQHSLGELLLLLAAEPPGRRRELLHTEVQNLMARAEYLKEQVKMRESRWEADTLDKEGLSESVRSSCTLQ

SEQ ID NO: 1167 - protein, 239 aa, Homo Sapiens
MPKSKRDKKVSLTKTAKKGLELKQNLIEELRKCVDTYKYLFIFSVANMRNSKLKDIRNAWKHSRMFFGKNKVMMVALGRSPSDEYKDNLHQVSKRLRGEVGLLFTNRTKEEVNEWFTKYTEMDYARAGNKAAFTVSLDPGPLEQFPHSMEPQLRQLGLPTALKRGVVTLLSDYEVCKEGDVLTPEQARVLKLFGYEMAEFKVTIKYMWDSQSGRFQQMGDDLPESASESTEESDSEDDD

SEQ ID NO: 1168 - protein, 579 aa, Homo Sapiens
MSASSLLEQRPKGQGNKVQNGSVHQKDGLNDDDFEPYLSPQARPNNAYTAMSDSYLPSYYSPSIGFSYSLGEAAWSTGGDTAMPYLTSYGQLSNGEPHFLPDAMFGQPGALGSTPFLGQHGFNFFPSGIDFSAWGNNSSQGQSTQSSGYSSNYAYAPSSLGGAMIDGQSAFANETLNKAPGMNTIDQGMAALKLGSTEVASNVPKVVGSAVGSGSITSNIVASNSLPPATIAPPKPASWADIASKPAKQQPKLKTKNGIAGSSLPPPPIKHNMDIGTWDNKGPVAKAPSQALVQNIGQPTQGSPQPVGQQANNSPPVAQASVGQQTQPLPPPPPQPAQLSVQQQAAQPTRWVAPRNRGSGFGHNGVDGNGVGQSQAGSGSTPSEPHPVLEKLRSINNYNPKDFDWNLKHGRVFIIKSYSEDDIHRSIKYNIWCSTEHGNKRLDAAYRSMNGKGPVYLLFSVNGSGHFCGVAEMKSAVDYNTCAGVWSQDKWKGRFDVRWIFVKDVPNSQLRHIRLENNENKPVTNSRDTQEVPLEKAKQVLKIIASYKHTTSIFDDFSHYEKRQEEEESVKKERQGRGK

SEQ ID NO: 1169 - protein, 212 aa, Homo Sapiens
MEAKTLGTVTPRKPVLSVSARKIKDNAADWHNLILKWETLNDAGFTTANNIANLKISLLNKDKIELDSSSPASKENEEKVCLEYNEELEKLCEELQATLDGLTKIQVKMEKLSSTTKGICELENYHYGEESKRPPLFHTWPTTHFYEVSHKLLEMYRKELLLKRTVAKELAHTGDPDLTLSYLSMWLHQPYVESDSRLHLESMLLETGHRAL

SEQ ID NO: 1170 - protein, 179 aa, Homo Sapiens
MSGGRAPAVLLGGVASLLLSFVWMPALLPVASRLLLLPRVLLTMASGSPPTQPSPASDSGSGYVPGSVSAAFVTCPNEKVAKEIARAVVEKRLAACVNLIPQITSIYEWKGKIEEDSEVLMMIKTQSSLVPALTDFVRSVHPYEVAEVIALPVEQGNFPYLQWVRQVTESVSDSITVLP

SEQ ID NO: 1171 - protein, 125 aa, Homo Sapiens
MESKEKRAVNSLSMENANQENEEKEQVANKGEPLALPLDAGEYCVPRGNRRRFRVRQPILQYRWDMMHRLGEPQARMREENMERIGEEVRQLMEKLREKQLSHSLRAVSTDPPHHDHHDEFCLMP

SEQ ID NO: 1172 - protein, 223 aa, Homo Sapiens
MLGVTTVRSRMRRALVFGMVVPSVLVPWLLLGASWLIPQTSFLSNVCGLSIGLAYGLTYCYSIDLSERVALKLDQTFPFSLMRRISVFKYVSGSSAERRAAQSRKLNPVPGSYPTQSCHPHLSPSHPVSQTQHASGQKLASWPSCTPGHMPTLPPYQPASGLCYVQNHFGPNPTSSSVYPASAGTSLGIQPPTPVNSPGTVYSGALGTPGAAGSKESSRVPMP

SEQ ID NO: 1173 - protein, 854 aa, Homo Sapiens
MASEGPREPESEGIKLSADVKPFVPRFAGLNVAWLESSEACVFPSSAATYYPFVQEPPVTEQKIYTEDMAFGASTFPPQYLSSEITLHPYAYSPYTLDSTQNVYSVPGSQYLYNQPSCYRGFQTVKHRNENTCPLPQEMKALFKKKTYDEKKTYDQQKFDSERADGTISSEIKSARGSHHLSIYAENSLKSDGYHKRTDRKSRIIAKNVSTSKPEFEFTTLDFPELQGAENNMSEIQKQPKWGPVHSVSTDISLLREVVKPAAVLSKGEIVVKNNPNESVTANAATNSPSCTRELSWTPMGYVVRQTLSTELSAAPKNVTSMINLKTIASSADPKNVSIPSSEALSSDPSYNKEKHIIHPTQKSKASQGSDLEQNEASRKNKKKKEKSTSKYEVLTVQEPPRIEDAEEFPNLAVASERRDRIETPKFQSKQQPQDNFKNNVKKSQLPVQLDLGGMLTALEKKQHSQHAKQSSKPVVVSVGAVPVLSKECASGERGRRMSQMKTPHNPLDSSAPLMKKGKQREIPKAKKPTSLKKIILKERQERKQRLQENAVSPAFTSDDTQDGESGGDDQFPEQAELSGPEGMDELISTPSVEDKSEEPPGTELQRDTEASHLAPNHTTFPKIHSRRFRDYCSQMLSKEVDACVTDLLKELVRFQDRMYQKDPVKAKTKRRLVLGLREVLKHLKLKKLKCVIISPNCEKIQSKGGLDDTLHTIIDYACEQNIPFVFALNRKALGRSLNKAVPVSVVGIFSYDGAQDQFHKMVELTVAARQAYKTMLENVQQELVGEPRPQAPPSLPTQGPSCPAEDGPPALKEKEEPHYIEIWKKHLEAYSGCTLELEESLEASTSQMMNLNL

SEQ ID NO: 1174 - protein, 292 aa, Homo Sapiens
MAAAAAAAVAGVGRGGGGAEPRQERSRARGWAGVERSEGRRMEPGEELEEEGSPGGREDGFTAEHLAAEAMAADMDPWLVFDARTTPATELDAWLAKYPPSQVTRYGDPGSPNSEPVGWIAVYGQGYSPNSGDVQGLQAAWEALQTSGRPITPGTLRQLAITHHVLSGKWLMHLAPGFKLDHAWAGIARAVVEGQLQVAKVSPRAKEGGRQVICVYTDDFTDRLGVLEADSAIRAAGIKCLLTYKPDVYTYLGIYRANRWHLCPTLYESRFQLGGSARGSRVLDRANNVELT

SEQ ID NO: 1175 - protein, 359 aa, Homo Sapiens
MVKLFIGNLPREATEQEIRSLFEQYGKVLECDIIKNYGFVHIEDKTAAEDAIRNLHHYKLHGVNINVEASKNKSKASTKLHVGNISPTCTNQELRAKFEEYGPVIECDIVKDYAFVHMERAEDAVEAIRGLDNTEFQGKRMHVQLSTSRLRTAPGMGDQSGCYRCGKEGHWSKECPVDRTGRVADFTEQYNEQYGAVRTPYTMGYGESMYYNDAYGALDYYKRYRVRSYEAVAAAAAASAYNYAEQTMSHLPQVQSTTVTSHLNSTSVDPYDRHLLPNSGAAATSAAMAAAAATTSSYYGRDRSPLRRAAAMLPTVGEGYGYGPESELSQASAATRNSLYDMARYEREQYVDRARYSAF

SEQ ID NO: 1176 - protein, 262 aa, Homo Sapiens
MALGLKCFRMVHPTFRNYLAASIRPVSEVTLKTVHERQHGHRQYMAYSAVPVRHFATKKAKAKGKGQSQTRVNINAALVEDIINLEEVNEEMKSVIEALKDNFNKTLNIRTSPGSLDKIAVVTADGKLALNQISQISMKSPQLILVNMASFPECTAAAIKAIRESGMNLNPEVEGTLIRVPIPQVTREHREMLVKLAKQNTNKAKDSLRKVRTNSMNKLKKSKDTVSEDTIRLIEKQISQMADDTVAELDRHLAVKTKELLG

SEQ ID NO: 1177 - protein, 409 aa, Homo Sapiens
MQRLAMDLRMLSRELSLYLEHQVRVGFFGSGVGLSLILGFSVAYAFYYLSSIAKKPQLVTGGESFSRFLQDHCPVVTETYYPTVWCWEGRGQTLLRPFITSKPPVQYRNELIKTADGGQISLDWFDNDNSTCYMDASTRPTILLLPGLTGTSKESYILHMIHLSEELGYRCVVFNNRGVAGENLLTPRTYCCANTEDLETVIHHVHSLYPSAPFLAAGVSMGGMLLLNYLGKIGSKTPLMAAATFSVGWNTFACSESLEKPLNWLLFNYYLTTCLQSSVNKHRHMFVKQVDMDHVMKAKSIREFDKRFTSVMFGYQTIDDYYTDASPSPRLKSVGIPVLCLNSVDDVFSPSHAIPIETAKQNPNVALVLTSYGGHIGFLEGIWPRQSTYMDRVFKQFVQAMVEHGHELS

SEQ ID NO: 1178 - protein, 1426 aa, Homo Sapiens
MNDWHRIFTQNVLVPPHPQRARQPWKESTAFQCVLKWLDGPVIRQGVLEVLSEVECHLRVSFFDVTYRHFFGRTWKTTVKPTKRPPSRIVFNEPLYFHTSLNHPHIVAVVEVVAEGKKRDGSLQTLSCGFGILRIFSNQPDSPISASQDKRLRLYHGTPRALLHPLLQDPAEQNRHMTLIENCSLQYTLKPHPALEPAFHLLPENLLVSGLQQIPGLLPAHGESGDALRKPRLQKPITGHLDDLFFTLYPSLEKFEEELLELHVQDHFQEGCGPLDGGALEILERRLRVGVHNGLGFVQRPQVVVLVPEMDVALTRSASFSRKVVSSSKTSSGSQALVLRSRLRLPEMVGHPAFAVIFQLEYVFSSPAGVDGNAASVTSLSNLACMHMVRWAVWNPLLEADSGRVTLPLQGGIQPNPSHCLVYKVPSASMSSEEVKQVESGTLRFQFSLGSEEHLDAPTEPVSGPKVERRPSRKPPTSPSSPPAPVPRVLAAPQNSPVGPGLSISQLAASPRSPTQHCLARPTSQLPHGSQASPAQAQEFPLEAGISHLEADLSQTSLVLETSIAEQLQELPFTPLHAPIVVGTQTRSSAGQPSRASMVLLQSSGFPEILDANKQPAEAVSATEPVTFNPQKEESDCLQSNEMVLQFLAFSRVAQDCRGTSWPKTVYFTFQFYRFPPATTPRLQLVQLDEAGQPSSGALTHILVPVSRDGTFDAGSPGFQLRYMVGPGFLKPGERRCFARYLAVQTLQIDVWDGDSLLLIGSAAVQMKHLLRQGRPAVQASHELEVVATEYEQDNMVVSGDMLGFGRVKPIGVHSVVKGRLHLTLANVGHPCEQKVRGCSTLPPSRSRVISNDGASRFSGGSLLTTGSSRRKHVVQAQKLADVDSELAAMLLTHARQGKGPQDVSRESDATRRRKLERMRSVRLQEAGGDLGRRGTSVLAQQSVRTQHLRDLQVIAAYRERTKAESIASLLSLAITTEHTLHATLGVAEFFEFVLKNPHNTQHTVTVEIDNPELSVIVDSQEWRDFKGAAGLHTPVEEDMFHLRGSLAPQLYLRPHETAHVPFKFQSFSAGQLAMVQASPGLSNEKGMDAVSPWKSSAVPTKHAKVLFRASGGKPIAVLCLTVELQPHVVDQVFRFYHPELSFLKKAIRLPPWHTFPGAPVGMLGEDPPVHVRCSDPNVICETQNVGPGEPRDIFLKVASGPSPEIKDFFVIIYSDRWLATPTQTWQVYLHSLQRVDVSCVAGQLTRLSLVLRGTQTVRKVRAFTSHPQELKTDPKGVFVLPPRGVQDLHVGVRPLRAGSRFVHLNLVDVDCHQLVASWLVCLCCRQPLISKAFEIMLAAGEGKGVNKRITYTNPYPSRRTFHLHSDHPELLRFREDSFQVGGGETYTIGLQFAPSQRVGEEEILIYINDHEDKNEEAFCVKVIYQ

SEQ ID NO: 1179 - protein, 216 aa, Homo Sapiens
MWPPCGTLRTLALARSRGARACSGDGGVSYTQGQSPEPRTREYFYYVDHQGQLFLDDSKMKNFITCFKDPQFLVTFFSRLRPNRSGRYEAAFPFLSPCGRERNFLRCEDRPVVFTHLLTADHGPPRLSYCGGGEALAVPFEPARLLPLAANGRLYHPAPERAGGVGLVRSALAFELSACFEYGPGAPALPSHVRWQGRRLALTMDLAPLLLAARSP

SEQ ID NO: 1180 - protein, 726 aa, Homo Sapiens
MSEETVPEAASPPPPQGQPYFDRFSEDDPEYMRLRNRAADLRQDFNLMEQKKRVTMILQSPSFREELEGLIQEQMKKGNNSSNIWALRQIADFMASTSHAVFPTSSMNVSMMTPINDLHTADSLNLAKGERLMRCKISSVYRLLDLYGWAQLSDTYVTLRVSKEQDHFLISPKGVSCSEVTASSLIKVNILGEVVEKGSSCFPVDTTGFCLHSAIYAARPDVRCIIHLHTPATAAVSAMKWGLLPVSHNALLVGDMAYYDFNGEMEQEADRINLQKCLGPTCKILVLRNHGVVALGDTVEEAFYKIFHLQAACEIQVSALSSAGGVENLILLEQEKHRPHEVGSVQWAGSTFGPMQKSRLGEHEFEALMRMLDNLGYRTGYTYRHPFVQEKTKHKSEVEIPATVTAFVFEEDGAPVPALRQHAQKQQKEKTRWLNTPNTYLRVNVADEVQRSMGSPRPKTTWMKADEVEKSSSGMPIRIENPNQFVPLYTDPQEVLEMRNKIREQNRQDVKSAGPQSQLLASVIAEKSRSPSTESQLMSKGDEDTKDDSEETVPNPFSQLTDQELEEYKKEVERKKLELDGEKETAPEEPGSPAKSAPASPVQSPAKEAETKSPLVSPSKSLEEGTKKTETSKAATTEPETTQPEGVVVNGREEEQTAEEILSKGLSQMTTSADTDVDTSKDKTESVTSGPMSPEGSPSKSPSKKKKKFRTPSFLKKSKKKEKVES

SEQ ID NO: 1181 - protein, 689 aa, Homo Sapiens
MADLEAVLADVSYLMAMEKSKATPAARASKKILLPEPSIRSVMQKYLEDRGEVTFEKIFSQKLGYLLFRDFCLNHLEEARPLVEFYEEIKKYEKLETEEERVARSREIFDSYIMKELLACSHPFSKSATEHVQGHLGKKQVPPDLFQPYIEEICQNLRGDVFQKFIESDKFTRFCQWKNVELNIHLTMNDFSVHRIIGRGGFGEVYGCRKADTGKMYAMKCLDKKRIKMKQGETLALNERIMLSLVSTGDCPFIVCMSYAFHTPDKLSFILDLMNGGDLHYHLSQHGVFSEADMRFYAAEIILGLEHMHNRFVVYRDLKPANILLDEHGHVRISDLGLACDFSKKKPHASVGTHGYMAPEVLQKGVAYDSSADWFSLGCMLFKLLRGHSPFRQHKTKDKHEIDRMTLTMAVELPDSFSPELRSLLEGLLQRDVNRRLGCLGRGAQEVKESPFFRSLDWQMVFLQKYPPPLIPPRGEVNAADAFDIGSFDEEDTKGIKLLDSDQELYRNFPLTISERWQQEVAETVFDTINAETDRLEARKKAKNKQLGHEEDYALGKDCIMHGYMSKMGNPFLTQWQRRYFYLFPNRLEWRGEGEAPQSLLTMEEIQSVEETQIKERKCLLLKIRGGKQFILQCDSDPELVQWKKELRDAYREAQQLVQRVPKMKNKPRSPVVELSKVPLVQRGSANGL

SEQ ID NO: 1182 - protein, 455 aa, Homo Sapiens
MSSSGLNSEKVAALIQKLNSDPQFVLAQNVGTTHDLLDICLKRATVQRAQHVFQHAVPQEGKPITNQKSSGRCWIFSCLNVMRLPFMKKLNIEEFEFSQSYLFFWDKVERCYFFLSAFVDTAQRKEPEDGRLVQFLLMNPANDGGQWDMLVNIVEKYGVIPKKCFPESYTTEATRRMNDILNHKMREFCIRLRNLVHSGATKGEISATQDVMMEEIFRVVCICLGNPPETFTWEYRDKDKNYQKIGPITPLEFYREHVKPLFNMEDKICLVNDPRPQHKYNKLYTVEYLSNMVGGRKTLYNNQPIDFLKKMVAASIKDGEAVWFGCDVGKHFNSKLGLSDMNLYDHELVFGVSLKNMNKAERLTFGESLMTHAMTFTAVSEKDDQDGAFTKWRVENSWGEDHGHKGYLCMTDEWFSEYVYEVVVDRKHVPEEVLAVLEQEPIILPAWDPMGALAE

SEQ ID NO: 1183 - protein, 906 aa, Homo Sapiens
MTAVHAGNINFKWDPKSLEIRTLAVERLLEPLVTQVTTLVNTNSKGPSNKKRGRSKKAHVLAASVEQATENFLEKGDKIAKESQFLKEELVAAVEDVRKQGDLMKAAAGEFADDPCSSVKRGNMVRAARALLSAVTRLLILADMADVYKLLVQLKVVEDGILKLRNAGNEQDLGIQYKALKPEVDKLNIMAAKRQQELKDVGHRDQMAAARGILQKNVPILYTASQACLQHPDVAAYKANRDLIYKQLQQAVTGISNAAQATASDDASQHQGGGGGELAYALNNFDKQIIVDPLSFSEERFRPSLEERLESIISGAALMADSSCTRDDRRERIVAECNAVRQALQDLLSEYMGNAGRKERSDALNSAIDKMTKKTRDLRRQLRKAVMDHVSDSFLETNVPLLVLIEAAKNGNEKEVKEYAQVFREHANKLIEVANLACSISNNEEGVKLVRMSASQLEALCPQVINAALALAAKPQSKLAQENMDLFKEQWEKQVRVLTDAVDDITSIDDFLAVSENHILEDVNKCVIALQEKDVDGLDRTAGAIRGRAARVIHVVTSEMDNYEPGVYTEKVLEATKLLSNTVMPRFTEQVEAAVEALSSDPAQPMDENEFIDASRLVYDGIRDIRKAVLMIRTPEELDDSDFETEDFDVRSRTSVQTEDDQLIAGQSARAIMAQLPQEQKAKIAEQVASFQEEKSKLDAEVSKWDDSGNDIIVLAKQMCMIMMEMTDFTRGKGPLKNTSDVISAAKKIAEAGSRMDKLGRTIADHCPDSACKQDLLAYLQRIALYCHQLNICSKVKAEVQNLGGELVVSGVDSAMSLIQAAKNLMNAVVQTVKASYVASTKYQKSQGMASLNLPAVSWKMKAPEKKPLVKREKQDETQTKIKRASQKKHVNPVQALSEFKAMDSI

SEQ ID NO: 1184 - protein, 595 aa, Homo Sapiens
MALTDGGWCLPKRFGAAGADASDSRAFPAREPSTPPSPISSSSSSCSRGGERGPGGASNCGTPQLDTEAAAGPPARSLLLSSYASHPFGAPHGPSAPGVAGPGGNLSSWEDLLLFTDLDQAATASKLLWSSRGAKLSPFAPEQPEEMYQTLAALSSQGPAAYDGAPGGFVHSAAAAAAAAAAASSPVYVPTTRVGSMLPGLPYHLQGSGSGPANHAGGAGAHPGWPQASADSPPYGSGGGAAGGGAAGPGGAGSAAAHVSARFPYSPSPPMANGAAREPGGYAAAGSGGAGGVSGGGSSLAAMGGREPQYSSLSAARPLNGTYHHHHHHHHHHPSPYSPYVGAPLTPAWPAGPFETPVLHSLQSRAGAPLPVPRGPSADLLEDLSESRECVNCGSIQTPLWRRDGTGHYLCNACGLYSKMNGLSRPLIKPQKRVPSSRRLGLSCANCHTTTTTLWRRNAEGEPVCNACGLYMKLHGVPRPLAMKKEGIQTRKRKPKNINKSKTCSGNSNNSIPMTPTSTSSNSDDCSKNTSPTTQPTASGAGAPVMTGAGESTNPENSELKYSGQDGLYIGVSLASPAEVTSSVRPDSWCALALA

SEQ ID NO: 1185 - protein, 194 aa, Homo Sapiens
MTENSTSAPAAKPKRAKASKKSTDHPKYSDMIVAAIQAEKNRAGSSRQSIQKYIKSHYKVGENADSQIKLSIKRLVTTGVLKQTKGVGASGSFRLAKSDEPKKSVAFKKTKKEIKKVATPKKASKPKKAASKAPTKKPKATPVKKAKKKLAATPKKAKKPKTVKAKPVKASKPKKAKPVKPKAKSSAKRAGKKK

SEQ ID NO: 1186 - protein, 688 aa, Homo Sapiens
MDGSFVQHSVRVLQELNKQREKGQYCDATLDVGGLVFKAHWSVLACCSHFFQSLYGDGSGGSVVLPAGFAEIFGLLLDFFYTGHLALTSGNRDQVLLAARELRVPEAVELCQSFKPKTSVGQAAGGQSGLGPPASQNVNSHVKEPAGLEEEEVSRTLGLVPRDQEPRGSHSPQRPQLHSPAQSEGPSSLCGKLKQALKPCPLEDKKPEDCKVPPRPLEAEGAQLQGGSNEWEVVVQVEDDGDGDYMSEPEAVLTRRKSNVIRKPCAAEPALSAGSLAAEPAENRKGTAVPVECPTCHKKFLSKYYLKVHNRKHTGEKPFECPKCGKCYFRKENLLEHEARNCMNRSEQVFTCSVCQETFRRRMELRVHMVSHTGEMPYKCSSCSQQFMQKKDLQSHMIKLHGAPKPHACPTCAKCFLSRTELQLHEAFKHRGEKLFVCEECGHRASSRNGLQMHIKAKHRNERPHVCEFCSHAFTQKANLNMHLRTHTGEKPFQCHLCGKTFRTQASLDKHNRTHTGERPFSCEFCEQRFTEKGPLLRHVASRHQEGRPHFCQICGKTFKAVEQLRVHVRRHKGVRKFECTECGYKFTRQAHLRRHMEIHDRVENYNPRQRKLRNLIIEDEKMVVVALQPPAELEVGSAEVIVESLAQGGLASQLPGQRLCAEESFTGPGVLEPSLIITAAVPEDCDT

SEQ ID NO: 1187 - protein, 736 aa, Homo Sapiens
MGSPLRFDGRVVLVTGAGAGLGRAYALAFAERGALVVVNDLGGDFKGVGKGSLAADKVVEEIRRRGGKAVANYDSVEEGEKVVKTALDAFGRIDVVVNNAGILRDRSFARISDEDWDIIHRVHLRGSFQVTRAAWEHMKKQKYGRIIMTSSASGIYGNFGQANYSAAKLGLLGLANSLAIEGRKSNIHCNTIAPNAGSRMTQTVMPEDLVEALKPEYVAPLVLWLCHESCEENGGLFEVGAGWIGKLRWERTLGAIVRQKNHPMTPEAVKANWKKICDFENASKPQSIQESTGSIIEVLSKIDSEGGVSANHTSRATSTATSGFAGAIGQKLPPFSYAYTELEAIMYALGVGASIKDPKDLKFIYEGSSDFSCLPTFGVIIGQKSMMGGGLAEIPGLSINFAKVLHGEQYLELYKPLPRAGKLKCEAVVADVLDKGSGVVIIMDVYSYSEKELICHNQFSLFLVGSGGFGGKRTSDKVKVAVAIPNRPPDAVLTDTTSLNQAALYRLSGDWNPLHIDPNFASLAGFDKPILHGLCTFGFSARRVLQQFADNDVSRFKAIKARFAKPVYPGQTLQTEMWKEGNRIHFQTKVQETGDIVISNAYVDLAPTSGTSAKTPSEGGKLQSTFVFEEIGRRLKDIGPEVVKKVNAVFEWHITKGGNIGAKWTIDLKSGSGKVYQGPAKGAADTTIILSDEDFMEVVLGKLDPQKAFFSGRLKARGNIMLSQKLQMILKDYAKL

SEQ ID NO: 1188 - protein, 904 aa, Homo Sapiens
MAESSESFTMASSPAQRRRGNDPLTSSPGRSSRRTDALTSSPGRDLPPFEDESEGLLGTEGPLEEEEDGEELIGDGMERDYRAIPELDAYEAEGLALDDEDVEELTASQREAAERAMRQRDREAGRGLGRMRRGLLYDSDEEDEERPARKRRQVERATEDGEEDEEMIESIENLEDLKGHSVREWVSMAGPRLEIHHRFKNFLRTHVDSHGHNVFKERISDMCKENRESLVVNYEDLAAREHVLAYFLPEAPAELLQIFDEAALEVVLAMYPKYDRITNHIHVRISHLPLVEELRSLRQLHLNQLIRTSGVVTSCTGVLPQLSMVKYNCNKCNFVLGPFCQSQNQEVKPGSCPECQSAGPFEVNMEETIYQNYQRIRIQESPGKVAAGRLPRSKDAILLADLVDSCKPGDEIELTGIYHNNYDGSLNTANGFPVFATVILANHVAKKDNKVAVGELTDEDVKMITSLSKDQQIGEKIFASIAPSIYGHEDIKRGLALALFGGEPKNPGGKHKVRGDINVLLCGDPGTAKSQFLKYIEKVSSRAIFTTGQGASAVGLTAYVQRHPVSREWTLEAGALVLADRGVCLIDEFDKMNDQDRTSIHEAMEQQSISISKAGIVTSLQARCTVIAAANPIGGRYDPSLTFSENVDLTEPIISRFDILCVVRDTVDPVQDEMLARFVVGSHVRHHPSNKEEEGLANGSAAEPAMPNTYGVEPLPQEVLKKYIIYAKERVHPKLNQMDQDKVAKMYSDLRKESMATGSIPITVRHIESMIRMAEAHARIHLRDYVIEDDVNMAIRVMLESFIDTQKFSVMRSMRKTFARYLSFRRDNNELLLFILKQLVAEQVTYQRNRFGAQQDTIEVPEKDLVDKARQINIHNLSAFYDSELFRMNKFSHDLKRKMILQQF

SEQ ID NO: 1189 - protein, 546 aa, Homo Sapiens
MGAYLSQPNTVKCSGDGVGAPRLPLPYGFSAMQGWRVSMEDAHNCIPELDSETAMFSVYDGHGGEEVALYCAKYLPDIIKDQKAYKEGKLQKALEDAFLAIDAKLTTEEVIKELAQIAGRPTEDEDEKEKVADEDDVDNEEAALLHEEATMTIEELLTRYGQNCHKGPPHSKSGGGTGEEPGSQGLNGEAGPEDSTRETPSQENGPTAKAYTGFSSNSERGTEAGQVGEPGIPTGEAGPSCSSASDKLPRVAKSKFFEDSEDESDEAEEEEEDSEECSEEEDGYSSEEAENEEDEDDTEEAEEDDEEEEEEMMVPGMEGKEEPGSDSGTTAVVALIRGKQLIVANAGDSRCVVSEAGKALDMSYDHKPEDEVELARIKNAGGKVTMDGRVNGGLNLSRAIGDHFYKRNKNLPPEEQMISALPDIKVLTLTDDHEFMVIACDGIWNVMSSQEVVDFIQSKISQRDENGELRLLSSIVEELLDQCLAPDTSGDGTGCDNMTCIIICFKPRNTAELQPESGKRKLEEVLSTEGAEENGNSDKKKKAKRD

SEQ ID NO: 1190 - protein, 196 aa, Homo Sapiens [sequence omitted]

SEQ ID NO: 1191 - protein, 707 aa, Homo Sapiens
MSRDRFRSRGGGGGGFHRRGGGGGRGGLHDFRSPPPGMGLNQNRGPMGPGPGQSGPKPPIPPPPPHQQQQQPPPQQPPPQQPPPHQPPPHPQPHQQQQPPPPPQDSSKPVVAQGPGPAPGVGSAPPASSSAPPATPPTSGAPPGSGPGPTPTPPPAVTSAPPGAPPPTPPSSGVPTTPPQAGGPPPPPAAVPGPGPGPKQGPGPGGPKGGKMPGGPKPGGGPGLSTPGGHPKPPHRGGGEPRGGRQHHPPYHQQHHQGPPPGGPGGRSEEKISDSEGFKANLSLLRRPGEKTYTQRCRLFVGNLPADITEDEFKRLFAKYGEPGEVFINKGKGFGFIKLESRALAEIAKAELDDTPMRGRQLRVRFATHAAALSVRNLSPYVSNELLEEAFSQFGPIERAVVIVDDRGRSTGKGIVEFASKPAARKAFERCSEGVFLLTTTPRPVIVEPLEQLDDEDGLPEKLAQKNPMYQKERETPPRFAQHGTFEYEYSQRWKSLDEMEKQQREQVEKNMKDAKDKLESEMEDAYHEHQANLLRQDLMRRQEELRRMEELHNQEMQKRKEMQLRQEEERRRREEEMMIRQREMEEQMRRQREESYSRMGYMDPRERDMRMGGGGAMNMGDPYGSGGQKFPPLGGGGGIGYEANPGVPPATMSGSMMGSDMRTERFGQGGAGPVGGQGPRGMGPGTPAGYGRGREEYEGPNKKPRF

SEQ ID NO: 1192 - protein, 272 aa, Homo Sapiens
MSGCRVFIGRLNPAAREKDVERFFKGYGRIRDIDLKRGFGFVEFEDPRDADDAVYELDGKELCSERVTIEHARARSRGGRGRGRYSDRFSSRRPRNDRRNAPPVRTENRLIVENLSSRVSWQDLKDFMRQAGEVTFADAHRPKLNEGVVEFASYGDLKNAIEKLSGKEINGRKIKLIEGSKRHSRSRSRSRSRTRSSSRSRSRSRSRSRKSYSRSRSRSRSRSRSKSRSVSRSPVPEKSQKRGSSSRSKSPASVDRQRSRSRSRSRSVDSGN

SEQ ID NO: 1193 - protein, 561 aa, Homo Sapiens
MAAEEMHWPVPMKAIGAQNLLTMPGGVAKAGYLHKKGGTQLQLLKWPLRFVIIHKRCVYYFKSSTSASPQGAFSLSGYNRVMRAAEETTSNNVFPFKIIHISKKHRTWFFSASSEEERKSWMALLRREIGHFHEKKDLPLDTSDSSSDTDSFYGAVERPVDISLSPYPTDNEDYEHDDEDDSYLEPDSPEPGRLEDALMHPPAYPPPPVPTPRKPAFSDMPRAHSFTSKGPGPLLPPPPPKHGLPDVGLAAEDSKRDPLCPRRAEPCPRVPATPRRMSDPPLSTMPTAPGLRKPPCFRESASPSPEPWTPGHGACSTSSAAIMATATSRNCDKLKSFHLSPRGPPTSEPPPVPANKPKFLKIAEEDPPREAAMPGLFVPPVAPRPPALKLPVPEAMARPAVLPRPEKPQLPHLQRSPPDGQSFRSFSFEKPRQPSQADTGGDDSDEDYEKVPLPNSVFVNTTESCEVERLFKATSPRGEPQDGLYCIRNSSTKSGKVLVVWDETSNKVRNYRIFEKDSKFYLEGEVLFVSVGSMVEHYHTHVLPSHQSLLLRHPYGYTGPR

SEQ ID NO: 1194 - protein, 490 aa, Homo Sapiens
MEQKPSKVECGSDPEENSARSPDGKRKRKNGQCSLKTSMSGYIPSYLDKDEQCVVCGDKATGYHYRCITCEGCKGFFRRTIQKNLHPTYSCKYDSCCVIDKITRNQCQLCRFKKCIAVGMAMDLVLDDSKRVAKRKLIEQNRERRRKEEMIRSLQQRPEPTPEEWDLIHIATEAHRSTNAQGSHWKQRRKFLPDDIGQSPIVSMPDGDKVDLEAFSEFTKIITPAITRVVDFAKKLPMFSELPCEDQIILLKGCCMEIMSLRAAVRYDPESDTLTLSGEMAVKREQLKNGGLGVVSDAIFELGKSLSAFNLDDTEVALLQAVLLMSTDRSGLLCVDKIEKSQEAYLLAFEHYVNHRKHNIPHFWPKLLMKEREVQSSILYKGAAAEGRPGGSLGVHPEGQQLLGMHVVQGPQVRQLEQQLGEAGSLQGPVLQHQSPKSPQQRLLELLHRSGILHARAVCGEDDSSEADSPSSSEEEPEVCEDLAGNAASP

SEQ ID NO: 1195 - protein, 235 aa, Homo Sapiens
MDPARPLGLSILLLFLTEAALGDAAQEPTGNNAEICLLPLDYGPCRALLLRYYYDRYTQSCRQFLYGGCEGNANNFYTWEACDDACWRIEKVPKVCRLQVSVDDQCEGSTEKYFFNLSSMTCEKFFSGGCHRNRIENRFPDEATCMGFCAPKKIPSFCYSPKDEGLCSANVTRYYFNPRYRTCDAFTYTGCGGNDNNFVSREDCKRACAKALKKKKKMPKLRFASRIRKIRKKQF

SEQ ID NO: 1196 - protein, 248 aa, Homo Sapiens
MFRFMRDVEPEDPMFLMDPFAIHRQHMSRMLSGGFGYSPFLSITDGNMPGTRPASRRMQQAGAVSPFGMLGMSGGFMDMFGMMNDMIGNMEHMTAGGNCQTFSSSTVISYSNTGDGAPKVYQETSEMRSAPGGIRETRRTVRDSDSGLEQMSIGHHIRDRAHILQRSRNHRTGDQEERQDYINLDESEAAAFDDEWRRETSRFRQQRPLEFRRLESSGAGGRRAEGPPRLAIQGPEDSPSRQSRRYDW

SEQ ID NO: 1197 - protein, 330 aa, Homo Sapiens
MADIIARLREDGIQKRVIQEGRGELPDFQDGTKATFHYRTLHSDDEGTVLDDSRARGKPMELIIGKKFKLPVWETIVCTMREGEIAQFLCDIKHVVLYPLVAKSLRNIAVGKDPLEGQRHCCGVAQMREHSSLGHADLDALQQNPQPLIFHMEMLKVESPGTYQQDPWAMTDEEKAKAVPLIHQEGNRLYREGHVKEAAAKYYDAIACLKNLQMKEQPGSPEWIQLDQQITPLLLNYCQCKLVVEEYYEVLDHCSSILNKYDDNVKAYFKRGKAHAAVWNAQEAQADFAKVLELDPALAPVVSRELQALEARIRQKDEEDKARFRGIFSH

SEQ ID NO: 1198 - protein, 1516 aa, Homo Sapiens
MDSPPKLTGETLIVHHIPLVHCQVPDRQCCGGAGGGGGSTRPNPFCPPELGITQPDQDLGQADSLLFSSLHSAPGGTARSIDSTKSRSRDGRGPGAPKRHNPFLLQEGVGEPGLGDLYDDSIGDSATQQSFHLHGTGQPNFHLSSFQLPPSGPRVGRPWGTTRSRAGVVEGQEQEPVMTLDTQQCGTSHCCRPELEAETMELDECGGPGGSGSGGGASDTSGFSFDQEWKLSSDESPRNPGCSGSGDQHCRCSSTSSQSEAADQSMGYVSDSSCNSSDGVLVTFSTLYNKMHGTPRANLNSAPQSCSDSSFCSHSDPGAFYLDLQPSPFESKMSYESHHPESGGREGGYGCPHASSPELDANCNSYRPHCEPCPAVADLTACFQSQARLVVATQNYYKLVTCDLSSQSSPSPAGSSITSCSEEHTKISPPPGPGPDPGPSQPSEYYLFQKPEVQPEEQEAVSSSTQAAAAVGPTVLEGQVYTNTSPPNLSTGRQRSRSYDRSLQRSPPVRLGSLERMLSCPVRLSEGPAAMAGPGSPPRRVTSFAELAKGRKKTGGSGSPPLRVSVGDSSQEFSPIQEAQQDRGAPLDEGTCCSHSLPPMPLGPGMDLLGPDPSPPWSTQVCQGPHSSEMPPAGLRATGQGPLAQLMDPGPALPGSPANSHTQRDARARADGGGTESRPVLRYSKEQRPTTLPIQPFVFQHHFPKQLAKARALHSLSQLYSLSGCSRTQQPAPLAAPAAQVSVPAPSGEPQASTPRATGRGARKAGSEPETSRPSPLGSYSPIRSVGPFGPSTDSSASTSCSPPPEQPTATESLPPWSHSCPSAVRPATSQQPQKEDQKILTLTEYRLHGTGSLPPLGSWRSGLSRAESLARGGGEGSMATRPSNANHLSPQALKWREYRRKNPLGPPGLSGSLDRRSQEARLARRNPIFEFPGSLSAASHLNCRLNGQAVKPLPLTCPDFQDPFSLTEKPPAEFCLSPDGSSEAISIDLLQKKGLVKAVNIAVDLIVAHFGTSRDPGVKAKLGNSSVSPNVGHLVLKYLCPAVRAVLEDGLKAFVLDVIIGQRKNMPWSVVEASTQLGPSTKVLHGLYNKVSQFPELTSHTMRFNAFILGLLNIRSLEFWFNHLYNHEDIIQTHYQPWGFLSAAHTVCPGLFEELLLLLQPLALLPFSLDLLFQHRLLQSGQQQRQHKELLRVSQDLLLSAHSTLQLARARGQEGPGDVDRAAQGERVKGVGASEGGEEEEEEEETEEVAEAAGGSGRARWARGGQAGWWYQLMQSSQVYIDGSIEGSRFPRGSSNSSSEKKKGAGGGGPPQAPPPREGVVEGAEACPASEEALGRERGWPFWMGSPPDSVLAELRRSREREGPAASPAENEEGASEPSPGGIKWGHLFGSRKAQREARPTNRLPSDWLSLDKSMFQLVAQTVGSRREPEPKESLQEPHSPALPSSPPCEVQALCHHLATGPGQLSFHKGDILRVLGRAGGDWLRCSRGPDSGLVPLAYVTLTPTPSPTPGSSQN

SEQ ID NO: 1199 - protein, 2357 aa, Homo Sapiens
MQPPPQTVPSGMAGPPPAGNPRSVFWASSPYRRRANNNAAVAPTTCPLQPVTDPFAFSRQALQSTPLGSSSKSSPPVLQGPAPAGFSQHPGLLVPHTHARDSSQGPCEPLPGPLTQPRAHASPFSGALTPSAPPGPEMNRSAEVGPSSEPEVQTLPYLPHYIPGVDPETSHGGHPHGNMPGLDRPLSRQNPHDGVVTPAASPSLPQPGLQMPGQWGPVQGGPQPSGQHRSPCPEGPVPSGVPCATSVPHFPTPSILHQGPGHEQHSPLVAPPAALPSDGRDEVSHLQSGSHLANNSDPESTFRQNPRIVNHWASPELRQNPGVKNEHRPASALVNPLARGDSPENRTHHPLGAGAGSGCAPLEADSGASGALAMFFQGGETENEENLSSEKAGLSGQADFDDFCSSPGLGRPPAPTHVGAGSLCQALLPGPSNEAAGDVWGDTASTGVPDASGSQYENVENLEFVQNQEVLPSEPLNLDPSSPSDQFRYGPLPGPAVPRHGAVCHTGAPDATLHTVHPDSVSSSYSSRSHGRLSGSARPQELVGTFIQQEVGKPEDEASGSFFKQIDSSPVGGETDETTVSQNYRGSVSQPSTPSPPKPTGIFQTSANSSFEPVKSHLVGVKPFEADRANVVGEVRETCVRQKQCRPAAALPDASPGNLEQPPDNMETLCAPQVCPLPLNSTTEAVHMLPHAGAPPLDTVYPAPEKRPSARTQGPVKCESPATTLWAQSELPDFGGNVLLAPAAPALYVCAKPQPPVVQPPEEAMSGQQSRNPSSAAPVQSRGGIGASENLENPPKMGEEEALQSQASSGYASLLSSPPTESLQNPPVLIAQPDHSYNLAQPINFSVSLSNSHEKNQSWREALVGDRPAVSSWALGGDSGENTSLSGIPTSSVLSLSLPSSVAQSNFPQGSGASEMVSNQPANLLVQPPSQPVPENLVPESQKDRKAGSALPGFANSPAGSTSVVLVPPAHGTLVPDGNKANHSSHQEDTYGALDFTLSRTLENPVNVYNPSHSDSLASQQSVASHPRQSGPGAPNLDRFYQQVTKDAQGQPGLERAQQELVPPQQQASPPQLPKAMFSELSNPESLPAQGQAQNSAQSPASLVLVDAGQQLPPRPPQSSSVSLVSSGSGQAAVPSEQPWPQPVPALAPGPPPQDLAAYYYYRPLYDAYQPQYSLPYPPEPGAASLYYQDVYSLYEPRYRPYDGAASAYAQNYRYPEPERPSSRASHSSERPPPRQGYPEGYYSSKSGWSSQSDYYASYYSSQYDYGDPGHWDRYHYSARVRDPRTYDRRYWCDAEYDAYRREHSAFGDRPEKRDNNWRYDPRFTGSFDDDPDPHRDPYGEEVDRRSVHSEHSARSLHSAHSLASRRSSLSSHSHQSQIYRSHNVAAGSYEAPLPPGSFHGDFAYGTYRSNFSSGPGFPEYGYPADTVWPAMEQVSSRPTSPEKFSVPHVCARFGPGGQLIKVIPNLPSEGQPALVEVHSMEALLQHTSEQEEMRAFPGPLAKDDTHKVDVINFAQNKAMKCLQNENLIDKESASLLWNFIVLLCRQNGTVVGTDIAELLLRDHRTVWLPGKSPNEANLIDFTNEAVEQVEEEESGEAQLSFLTGGPAAAASSLERETERFRELLLYGRKKDALESAMKNGLWGHALLLASKMDSRTHARVMTRFANSLPINDPLQTVYQLMSGRMPAASTCCGDEKWGDWRPHLAMVLSNLNNNMDVESRTMATMGDTLASRGLLDAAHFCYLMAQAGFGVYTKKTTKLVLIGSNHSLPFLKFATNEAIQRTEAYEYAQSLGAETCPLPSFQVFKFIYSCRLAEMGLATQAFHYCEAIAKSILTQPHLYSPVLISQLVQMASQLRLFDPQLKEKPEEESLAAPTWLVHLQQVERQIKEGAGVWHQDGALPQQCPGTPSSEMEQLDRPGLSQPGALGIANPLLAVPAPSPEHSSPSVRLLPSAPQTLPDGPLASPARVPMFPVPLPPGPLEPGPGCVTPGPALGFLEPSGPGLPPGVPPLQERRHLLQEARSPDPGIVPQEAPVGNSLSELSEENFDGKFANLTPSRTVPDSEAPPGWDRADSGPTQPPLSLSPAPETKRPGQAAKKETKEPKKGESWFFRWLPGKKKTEAYLPDDKNKSIVWDEKKNQWVNLNEPEEEKKAPPPPPTSMPKTVQAAPPALPGPPGAPVNMYSRRAAGTRARYVDVLNPSGTQRSEPALAPADFVAPLAPLPIPSNLFVPTPDAEEPQLPDGTGREGPAAARGLANPEPAPEPKVLSSAASLPGSELPSSRPEGSQGGELSRCSSMSSLSREVSQHFNQAPGDLPAAGGPPSGAMPFYNPAQLAQACATSGSSRLGRIGQRKHLVLN

SEQ ID NO: 1200 - protein, 323 aa, Homo Sapiens
MAAELSMGPELPTSPLAMEYVNDFDLLKFDVKKEPLGRAERPGRPCTRLQPAGSVSSTPLSTPCSSVPSSPSFSPTEQKTHLEDLYWMASNYQQMNPEALNLTPEDAVEALIGSHPVPQPLQSFDSFRGAHHHHHHHHPHPHHAYPGAGVAHDELGPHAHPHHHHHHQASPPPSSAASPAQQLPTSHPGPGPHATASATAAGGNGSVEDRFSDDQLVSMSVRELNRHLRGFTKDEVIRLKQKRRTLKNRGYAQSCRYKRVQQKHHLENEKTQLIQQVEQLKQEVSRLARERDAYKVKCEKLANSGFREAGSTSDSPSSPEFFL

SEQ ID NO: 1201 - protein, 751 aa, Homo Sapiens
MAFRTICVLVGVFICSICVKGSSQPQARVYLTFDELRETKTSEYFSLSHHPLDYRILLMDEDQDRIYVGSKDHILSLNINNISQEALSVFWPASTIKVEECKMAGKDPTHGCGNFVRVIQTFNRTHLYVCGSGAFSPVCTYLNRGRRSEDQVFMIDSKCESGKGRCSFNPNVNTVSVMINEELFSGMYIDFMGTDAAIFRSLTKRNAVRTDQHNSKWLSEPMFVDAHVIPDGTDPNDAKVYFFFKEKLTDNNRSTKQIHSMIARICPNDTGGLRSLVNKWTTFLKARLVCSVTDEDGPETHFDELEDVFLLETDNPRTTLVYGIFTTSSSVFKGSAVCVYHLSDIQTVFNGPFAHKEGPNHQLISYQGRIPYPRPGTCPGGAFTPNMRTTKEFPDDVVTFIRNHPLMYNSIYPIHKRPLIVRIGTDYKYTKIAVDRVNAADGRYHVLFLGTDRGTVQKVVVLPTNNSVSGELILEELEVFKNHAPITTMKISSKKQQLYVSSNEGVSQVSLHRCHIYGTACADCCLARDPYCAWDGHSCSRFYPTGKRRSRRQDVRHGNPLTQCRGFNLKAYRNAAEIVQYGVKNNTTFLECAPKSPQASIKWLLQKDKDRRKEVKLNERIIATSQGLLIRSVQGSDQGLYHCIATENSFKQTIAKINFKVLDSEMVAVVTDKWSPWTWASSVRALPFHPKDIMGAFSHSEMQMINQYCKDTRQQHQQGDESQKMRGDYGKLKALINSRKSRNRRNQLPES

SEQ ID NO: 1202 - protein, 744 aa, Homo Sapiens
MAKREDSPGPEVQPMDKQFLVCSICLDRYQCPKVLPCLHTFCERCLQNYIPAQSLTLSCPVCRQTSILPEQGVSALQNNFFISSLMEAMQQAPDGAHDPEDPHPLSVVAGRPLSCPNHEGKTMEFYCEACETAMCGECRAGEHREHGTVLLRDVVEQHKAALQRQLEAVRGRLPQLSAAIALVGGISQQLQERKAEALAQISAAFEDLEQALQQRKQALVSDLETICGAKQKVLQSQLDTLRQGQEHIGSSCSFAEQALRLGSAPEVLLVRKHMRERLAALAAQAFPERPHENAQLELVLEVDGLRRSVLNLGALLTTSATAHETVATGEGLRQALVGQPASLTVTTKDKDGRLVRTGSAELRAEITGPDGTRLPVPVVDHKNGTYELVYTARTEGELLLSVLLYGQPVRGSPFRVRALRPGDLPPSPDDVKRRVKSPGGPGSHVRQKAVRRPSSMYSTGGKRKDNPIEDELVFRVGSRGREKGEFTNLQGVSAASSGRIVVADSNNQCIQVFSNEGQFKFRFGVRGRSPGQLQRPTGVAVDTNGDIIVADYDNRWVSIFSPEGKFKTKIGAGRLMGPKGVAVDRNGHIIVVDNKSCCVFTFQPNGKLVGRFGGRGATDRHFAGPHFVAVNNKNEIVVTDFHNHSVKVYSADGEFLFKFGSHGEGNGQFNAPTGVAVDSNGNIIVADWGNSRIQVFDSSGSFLSYINTSAEPLYGPQGLALTSDGHVVVADAGNHCFKAYRYLQ

SEQ ID NO: 1203 - protein, 1327 aa, Homo Sapiens
MEAPLQTGMVLGVMIGAGVAVVVTAVLILLVVRRLRVPKTPAPDGPRYRFRKRDKVLFYGRKIMRKVSQSTSSLVDTSVSATSRPRMRKKLKMLNIAKKILRIQKETPTLQRKEPPPAVLEADLTEGDLANSHLPSEVLYMLKNVRVLGHFEKPLFLELCRHMVFQRLGQGDYVFRPGQPDASIYVVQDGLLELCLPGPDGKECVVKEVVPGDSVNSLLSILDVITGHQHPQRTVSARAARDSTVLRLPVEAFSAVFTKYPESLVRVVQIIMVRLQRVTFLALHNYLGLTNELFSHEIQPLRLFPSPGLPTRTSPVRGSKRMVSTSATDEPRETPGRPPDPTGAPLPGPTGDPVKPTSLETPSAPLLSRCVSMPGDISGLQGGPRSDFDMAYERGRISVSLQEEASGGSLAAPARTPTQEPREQPAGACEYSYCEDESATGGCPFGPYQGRQTSSIFEAAKQELAKLMRIEDPSLLNSRVLLHHAKAGTIIARQGDQDVSLHFVLWGCLHVYQRMIDKAEDVCLFVAQPGELVGQLAVLTGEPLIFTLRAQRDCTFLRISKSDFYEIMRAQPSVVLSAAHTVAARMSPFVRQMDFAIDWTAVEAGRALYRQGDRSDCTYIVLNGRLRSVIQRGSGKKELVGEYGRGDLIGVVEALTRQPRATTVHAVRDTELAKLPEGTLGHIKRRYPQVVTRLIHLLSQKILGNLQQLQGPFPAGSGLGVPPHSELTNPASNLATVAILPVCAEVPMVAFTLELQHALQAIGPTLLLNSDIIRARLGASALDSIQEFRLSGWLAQQEDAHRIVLYQTDASLTPWTVRCLRQADCILIVGLGDQEPTLGQLEQMLENTAVRALKQLVLLHREEGAGPTRTVEWLNMRSWCSGHLHLRCPRRLFSRRSPAKLHELYEKVFSRRADRHSDFSRLARVLTGNTIALVLGGGGARGCSHIGVLKALEEAGVPVDLVGGTSIGSFIGALYAEERSASRTKQRAREWAKSMTSVLEPVLDLTYPVTSMFTGSAFNRSIHRVFQDKQIEDLWLPYFNVTTDITASAMRVHKDGSLWRYVRASMTLSGYLPPLCDPKDGHLLMDGGYINNLPADIARSMGAKTVIAIDVGSQDETDLSTYGDSLSGWWLLWKRLNPWADKVKVPDMAEIQSRLAYVSCVRQLEVVKSSSYCEYLRPPIDCFKTMDFGKFDQIYDVGYQYGKAVFGGWSRGNVIEKMLTDRRSTDLNESRRADVLAFPSSGFTDLAEIVSRIEPPTSYVSDGCADGEESDCLTEYEEDAGPDCSRDEGGSPEGASPSTASEMEEEKSILRQRRCLPQEPPGSATDA

SEQ ID NO: 1204 - protein, 141 aa, Homo Sapiens [sequence omitted]

SEQ ID NO: 1205 - protein, 285 aa, Homo Sapiens
MAGLGHPAAFGRATHAVVRALPESLGQHALRSAKGEEVDVARAERQHQLYVGVLGSKLGLQVVELPADESLPDCVFVEDVAVVCEETALITRPGAPSRRKEVDMMKEALEKLQLNIVEMKDENATLDGGDVLFTGREFFVGLSKRTNQRGAEILADTFKDYAVSTVPVADGLHLKSFCSMAGPNLIAIGSSESAQKALKIMQQMSDHRYDKLTVPDDIAANCIYLNIPNKGHVLLHRTPEEYPESAKVYEKLKDHMLIPVSMSELEKVDGLLTCCSVLINKKVDS

SEQ ID NO: 1206 - protein, 482 aa, Homo Sapiens
MAEAATPGTTATTSGAGAAAATAAAASPTPIPTVTAPSLGAGGGGGGSDGSGGGWTKQVTCRYFMHGVCKEGDNCRYSHDLSDSPYSVVCKYFQRGYCIYGDRCRYEHSKPLKQEEATATELTTKSSLAASSSLSSIVGPLVEMNTGEAESRNSNFATVGAGSEDWVNAIEFVPGQPYCGRTAPSCTEAPLQGSVTKEESEKEQTAVETKKQLCPYAAVGECRYGENCVYLHGDSCDMCGLQVLHPMDAAQRSQHIKSCIEAHEKDMELSFAVQRSKDMVCGICMEVVYEKANPSERRFGILSNCNHTYCLKCIRKWRSAKQFESKIIKSCPECRITSNFVIPSEYWVEEKEEKQKLILKYKEAMSNKACRYFDEGRGSCPFGGNCFYKHAYPDGRREEPQRQKVGTSSRYRAQRRNHFWELIEERENSNPFDNDEEEVVTFELGEMLLMLLAAGGDDELTDSEDEWDLFHDELEDFYDLDL

SEQ ID NO: 1207 - protein, 764 aa, Homo Sapiens [sequence omitted]

SEQ ID NO: 1208 - protein, 818 aa, Homo Sapiens
MFSQQQQQQLQQQQQQLQQLQQQQLQQQQLQQQQLLQLQQLLQQSPPQAPLPMAVSRGLPPQQPQQPLLNLQGTNSASLLNGSMLQRALLLQQLQGNLRGYGMASPGLAAPSLTPPQLATPNLQQFFPQATRQSLLGPPPVGVPMNPSQFNLSGRNPQKQARTSSSTTPNRKDSSSQTMPVEDKSDPPEGSEEAAEPRMDTPEDQDLPPCPEDIAKEKRTPAPEPEPCEASELPAKRLRSSEEPTEKEPPGQLQVKAQPQARMTVPKQTQTPDLLPEALEAQVLPRFQPRVLQVQAQVQSQTQPRIPSTDTQVQPKLQKQAQTQTSPEHLVLQQKQVQPQLQQEAEPQKQVQPQVHTQAQPSVQPQEHPPAQVSVQPPEQTHEQPHTQPQVSLLAPEQTPVVVHVCGLEMPPDAVEAGGGMEKTLPEPVGTQVSMEEIQNESACGLDVGECENRAREMPGVWGAGGSLKVTILQSSDSRAFSTVPLTPVPRPSDSVSSTPAATSTPSKQALQFFCYICKASCSSQQEFQDHMSEPQHQQRLGEIQHMSQACLLSLLPVPRDVLETEDEEPPPRRWCNTCQLYYMGDLIQHRRTQDHKIAKQSLRPFCTVCNRYFKTPRKFVEHVKSQGHKDKAKELKSLEKEIAGQDEDHFITVDAVGCFEGDEEEEEDDEDEEEIEVEEELCKQVRSRDISREEWKGSETYSPNTAYGVDFLVPVMGYICRICHKFYHSNSGAQLSHCKSLGHFENLQKYKAAKNPSPTTRPVSRRCAINARNALTALFTSSGRPPSQPNTQDKTPSKVTARPSQPPLPRRSTRLKT

SEQ ID NO: 1209 - protein, 749 aa, Homo Sapiens
MSGSHTPACGPFSALTPSIWPQEILAKYTQKEESAEQPEFYYDEFGFRVYKEEGDEPGSSLLANSPLMEDAPQRLRWQAHLEFTHNHDVGDLTWDKIAVSLPRSEKLRSLVLAGIPHGMRPQLWMRLSGALQKKRNSELSYREIVKNSSNDETIAAKQIEKDLLRTMPSNACFASMGSIGVPRLRRVLRALAWLYPEIGYCQGTGMVAACLLLFLEEEDAFWMMSAIIEDLLPASYFSTTLLGVQTDQRVLRHLIVQYLPRLDKLLQEHDIELSLITLHWFLTAFASVVDIKLLLRIWDLFFYEGSRVLFQLTLGMLHLKEEELIQSENSASIFNTLSDIPSQMEDAELLLGVAMRLAGSLTDVAVETQRRKHLAYLIADQGQLLGAGTLTNLSQVVRRRTQRRKSTITALLFGEDDLEALKAKNIKQTELVADLREAILRVARHFQCTDPKNCSVELTPDYSMESHQRDHENYVACSRSHRRRAKALLDFERHDDDELGFRKNDIITIVSQKDEHCWVGELNGLRGWFPAKFVEVLDERSKEYSIAGDDSVTEGVTDLVRGTLCPALKALFEHGLKKPSLLGGACHPWLFIEEAAGREVERDFASVYSRLVLCKTFRLDEDGKVLTPEELLYRAVQSVNVTHDAVHAQMDVKLRSLICVGLNEQVLHLWLEVLCSSLPTVEKWYQPWSFLRSPGWVQIKCELRVLCCFAFSLSQDWELPAKREAQQPLKEGVRDMLVKHHLFSWDVDG

SEQ ID NO: 1210 - protein, 460 aa, Homo Sapiens [sequence omitted]

SEQ ID NO: 1211 - protein, 559 aa, Homo Sapiens
MATALSEEELDNEDYYSLLNVRREASSEELKAAYRRLCMLYHPDKHRDPELKSQAERLFNLVHQAYEVLSDPQTRAIYDIYGKRGLEMEGWEVVERRRTPAEIREEFERLQREREERRLQQRTNPKGTISVGVDATDLFDRYDEEYEDVSGSSFPQIEINKMHISQSIEAPLTATDTAILSGSLSTQNGNGGGSINFALRRVTSAKGWGELEFGAGDLQGPLFGLKLFRNLTPRCFVTTNCALQFSSRGIRPGLTTVLARNLDKNTVGYLQWRWGIQSAMNTSIVRDTKTSHFTVALQLGIPHSFALISYQHKFQDDDQTRVKGSLKAGFFGTVVEYGAERKISRHSVLGAAVSVGVPQGVSLKVKLNRASQTYFFPIHLTDQLLPSAMFYATVGPLVVYFAMHRLIIKPYLRAQKEKELEKQRESAATDVLQKKQEAESAVRLMQESVRRIIEAEESRMGLIIVNAWYGKFVNDKSRKSEKVKVIDVTVPLQCLVKDSKLILTEASKAGLPGFYDPCVGEEKNLKVLYQFRGVLHQVMVLDSEALRIPKQSHRIDTDG

SEQ ID NO: 1212 - protein, 293 aa, Homo Sapiens
MGFPAAALLCALCCGLLAPAARAGYSEERCSWRGSGLTQEPGSVGQLALACAEGAVEWLYPAGALRLTLGGPDPRARPGIACLRPVRPFAGAQVFAERAGGALELLLAEGPGPAGGRCVRWGPRERRALFLQATPHQDISRRVAAFRFELREDGRPELPPQAHGLGVDGACRPCSDAELLLAACTSDFVIHGIIHGVTHDVELQESVITVVAARVLRQTPPLFQAGRSGDQGLTSIRTPLRCGVHPGPGTFLFMGWSRFGEARLGCAPRFQEFRRAYEAARAAHLHPCEVALH

SEQ ID NO: 1213 - protein, 167 aa, Homo Sapiens
MPKRKKQNHHQPPTQQQPPLPEREETGDEEDGSPIALHRGPPGSRGPLIPPLLSLPPPPWGRGPIRRGLGPRSSPYGRGWWGVNAEPPFPGPGHGGPTRGSFHKEQRNPRRLKSWSLIKNTCPPKDDPQVMEDKSDRPVCRHFAKKGHCRYEDLCAFYHPGVNGPPL

SEQ ID NO: 1214 - protein, 164 aa, Homo Sapiens
MESGDEAAIERHRVHLRSATLRDAVPATLHLLPCEVAVDGPAPVGRFFTPAIRQGPEGLEVSFRGRCLRGEEVAVPPGLVGYVMVTEEKKVSMGKPDPLRDSGTDDQEEEPLERDFDRFIGATANFSRFTLWGLETIPGPDAKVRGALTWPSLAAAIHAQVPED

SEQ ID NO: 1215 - protein, 618 aa, Homo Sapiens
MRRDVRILLLGEAQVGKTSLILSLVGEEFPEEVPPRAEEITIPADVTPEKVPTHIVDYSEAEQTDEELREEIHKANVVCVVYDVSEEATIEKIRTKWIPLVNGGTTQGPRVPIILVGNKSDLRSGSSMEAVLPIMSQFPEIETCVECSAKNLRNISELFYYAQKAVLHPTAPLYDPEAKQLRPACAQALTRIFRLSDQDLDQALSDEELNAFQKSCFGHPLAPQALEDVKTVVCRNVAGGVREDRLTLDGFLFLNTLFIQRGRHETTWTILRRFGYSDALELTADYLSPLIHVPPGCSTELNHLGYQFVQRVFEKHDQDRDGALSPVELQSLFSVFPAAPWGPELPRTVRTEAGRLPLHGYLCQWTLVTYLDVRSCLGHLGYLGYPTLCEQDQAHAITVTREKRLDQEKGQTQRSVLLCKVVGARGVGKSAFLQAFLGRGLGHQDTREQPPGYAIDTVQVNGQEKYLILCEVGTDGLLATSLDATCDVACLMFDGSDPKSFAHCASVYKHHYMDGQTPCLFVSSKADLPEGVAVSGPSPAEFCRKHRLPAPVPFSCAGPAEPSTTIFTQLATMAAFPHLVHAELHPSSFWLRGLLGVVGAAVAAVLSFSLYRVLVKSQ

SEQ ID NO: 1216 - protein, 476 aa, Homo Sapiens
MVSKRIAQETFDAAVRENIEEFAMGPEEAVKEAVEQFESQGVDLSNIVKTAPKVSADGSQEPTHDILQMLSDLQESVASSRPQEVSAYLTRFCDQCKQDKACRFLAAQKGAYPIIFTAWKLATAGDQGLLLQSLNALSVLTDGQPDLLDAQGLQLLVATLTQNADEADLTCSGIRCVRHACLKHEQNRQDLVKAGVLPLLTGAITHHGHHTDVVREACWALRVMTFDDDIRVPFGHAHNHAKMIVQENKGLKVLIEATKAFLDNPGILSELCGTLSRLAIRNEFCQEVVDLGGLSILVSLLADCNDHQMRDQSGVQELVKQVLSTLRAIAGNDDVKDAIVRAGGTESIVAAMTQHLTSPQVCEQSCAALCFLALRKPDNSRIIVEGGGAVAALQAMKAHPQKAGVQKQACMLIRNLVAHGQAFSKPILDLGAEALIMQARSAHRDCEDVAKAALRDLGCHVELRELWTGQRGNLAP

SEQ ID NO: 1217 - protein, 154 aa, Homo Sapiens
MASASARGNQDKDAHFPPPSKQSLLFCPKSKLHIHRAEISKIMRECQEESFWKRALPFSLVSMLVTQGLVYQGYLAANSRFGSLPKVALAGLLGFGLGKVSYIGVCQSKFHFFEDQLRGAGFGPQHNRHCLLTCEECKIKHGLSEKGDSQPSAS

SEQ ID NO: 1218 - protein, 363 aa, Homo Sapiens
MAHVLQKPKHSGTHSIVQEFQVPDYVPWQQSKQETKPSTLPPVQQANSLHTSKMKTLTRVQPVFHFKPTTVVTSCQPKNPRELHRRRKLDPGKMHAKIWLMKTSLRSGRAALRELRSRENFLSKLNRELIETIQEMENSTTLHVRALLQQQDTLATIIDILEYSNKKRLQQLKSELQEWEEKKKCKMSYLEQQAEQLNAKIEKTQEEVNFLSTYMDHEYSIKSVQISTLMRQLQQVKDSQQDELDDLGEMRRKVLESLSDKIQKKKKKILSSVVAETQRPYEEALLQKMWESQDFLKCMQRFREIIDQFEENMPVLRAEVEELQAQTREPREVIFEDVLLRRPKCTPDMDVILNIPVEEPLPF

SEQ ID NO: 1219 - protein, 691 aa, Homo Sapiens
MMRNHRIASSLCGDQVFSKKKKKKKKNNMAAKEKLEAVLNVALRVPSIMLLDVLYRWDVSSFFQQIQRSSLSNNPLFQYKYLALNMHYVGYILSVVLLTLPRQHLVQLYLYFLTALLLYAGHQISRDYVRSELEFAYEGPMYLEPLSMNRFTTALIGQLVVCTLCSCVMKTKQIWLFSAHMLPLLARLCLVPLETIVIINKFAMIFTGLEVLYFLGSNLLVPYNLAKSAYRELVQVVEVYGLLALGMSLWNQLVVPVLFMVFWLVLFALQIYSYFSTRDQPASRERLLFLFLTSIAECCSTPYSLLGLVFTVSFVALGVLTLCKFYLQGYRAFMNDPAMNRGMTEGVTLLILAVQTGLIELQVVHRAFLLSIILFIVVASILQSMLEIADPIVLALGASRDKSLWKHFRAVSLCLFLLVFPAYMAYMICQFFHMDFWLLIIISSSILTSLQVLGTLFIYVLFMVEEFRKEPVENMDDVIYYVNGTYRLLEFLVALCVVAYGVSETIFGEWTVMGSMIIFIHSYYNVWLRAQLGWKSFLLRRDAVNKIKSLPIATKEQLEKHNDICAICYQDMKSAVITPCSHFFHAGCLKKWLYVQETCPLCHCHLKNSSQLPGLGTEPVLQPHAGAEQNVMFQEGTEPPGQEHTPGTRIQEGSRDNNEYIARRPDNQEGAFDPKEYPHSAKDEAHPVESA

SEQ ID NO: 1220 - protein, 986 aa, Homo Sapiens
MPGVARLPLLLGLLLLPRPGRPLDLADYTYDLAEEDDSEPLNYKDPCKAAAFLGDIALDEEDLRAFQVQQAVDLRRHTARKSSIKAAVPGNTSTPSCQSTNGQPQRGACGRWRGRSRSRRAATSRPERVWPDGVIPFVIGGNFTGSQRAVFRQAMRHWEKHTCVTFLERTDEDSYIVFTYRPCGCCSYVGRRGGGPQAISIGKNCDKFGIVVHELGHVVGFWHEHTRPDRDRHVSIVRENIQPGQEYNFLKMEPQEVESLGETYDFDSIMHYARNTFSRGIFLDTIVPKYEVNGVKPPIGQRTRLSKGDIAQARKLYKCPACGETLQDSTGNFSSPEYPNGYSAHMHCVWRISVTPGEKIILNFTSLDLYRSRLCWYDYVEVRDGFWRKAPLRGRFCGSKLPEPIVSTDSRLWVEFRSSSNWVGKGFFAVYEAICGGDVKKDYGHIQSPNYPDDYRPSKVCIWRIQVSEGFHVGLTFQSFEIERHDSCAYDYLEVRDGHSESSTLIGRYCGYEKPDDIKSTSSRLWLKFVSDGSINKAGFAVNFFKEVDECSRPNRGGCEQRCLNTLGSYKCSCDPGYELAPDKRRCEAACGGFLTKLNGSITSPGWPKEYPPNKNCIWQLVAPTQYRISLQFDFFETEGNDVCKYDFVEVRSGLTADSKLHGKFCGSEKPEVITSQYNNMRVEFKSDNTVSKKGFKAHFFSDKDECSKDNGGCQQDCVNTFGSYECQCRSGFVLHDNKHDCKEAGCDHKVTSTSGTITSPNWPDKYPSKKECTWAISSTPGHRVKLTFMEMDIESQPECAYDHLEVFDGRDAKAPVLGRFCGSKKPEPVLATGSRMFLRFYSDNSVQRKGFQASHATECGGQVRADVKTKDLYSHAQFGDNNYPGGVDCEWVIVAEEGYGVELVFQTFEVEEETDCGYDYMELFDGYDSTAPRLGRYCGSGPPEEVYSAGDSVLVKFHSDDTITKKGFHLRYTSTKFQDTLHSRK

SEQ ID NO: 1221 - protein, 305 aa, Homo Sapiens
MERLVARGTFPVLVRTSACRSLFGPVDHEELSRELQARLAELNAEDQNRWDYDFQQDMPLRGPGRLQWTEVDSDSVPAFYRETVQVGRCRLLLAPRPVAVAVAVSPPLEPAAESLDGLEEAPEQLPSVPVPAPASTPPPVPVLAPAPAPAPAPVAAPVAAPVAVAVLAPAPAPAPAPAPAPAPVAAPAPAPAPAPAPAPAPAPAPDAAPQESAEQGANQGQRGQEPLADQLHSGISGRPAAGTAAASANGAAIKKLSGPLISDFFAKRKRSAPEKSSGDVPAPCPSPSAAPGVGSVEQTPRKRLR

SEQ ID NO: 1222 - protein, 339 aa, Homo Sapiens
MWQLWASLCCLLVLANARSRPSFHPLSDELVNYVNKRNTTWQAGHNFYNVDMSYLKRLCGTFLGGPKPPQRVMFTEDLKLPASFDAREQWPQCPTIKEIRDQGSCGSCWAFGAVEAISDRICIHTNAHVSVEVSAEDLLTCCGSMCGDGCNGGYPAEAWNFWTRKGLVSGGLYESHVGCRPYSIPPCEHHVNGSRPPCTGEGDTPKCSKICEPGYSPTYKQDKHYGYNSYSVSNSEKDIMAEIYKNGPVEGAFSVYSDFLLYKSGVYQHVTGEMMGGHAIRILGWGVENGTPYWLVANSWNTDWGDNGFFKILRGQDHCGIESEVVAGIPRTDQYWEKI

SEQ ID NO: 1223 - protein, 326 aa, Homo Sapiens
MSNGYEDHMAEDCRGDIGRTNLIVNYLPQNMTQDELRSLFSSIGEVESAKLIRDKVAGHSLGYGFVNYVTAKDAERAINTLNGLRLQSKTIKVSYARPSSEVIKDANLYISGLPRTMTQKDVEDMFSRFGRIINSRVLVDQTTGLSRGVAFIRFDKRSEAEEAITSFNGHKPPGSSEPITVKFAANPNQNKNVALLSQLYHSPARRFGGPVHHQAQRFRFSPMGVDHMSGLSGVNVPGNASSGWCIFIYNLGQDADEGILWQMFGPFGAVTNVKVIRDFNTNKCKGFGFVTMTNYEEAAMAIASLNGYRLGDKILQVSFKTNKSHK

SEQ ID NO: 1224 - protein, 404 aa, Homo Sapiens
MAMVTGGWGGPGGDTNGVDKAGGYPRAAEDDSASPPGAASDAEPGDEERPGLQVDCVVCGDKSSGKHYGVFTCEGCKSFFKRSIRRNLSYTCRSNRDCQIDQHHRNQCQYCRLKKCFRVGMRKEAVQRGRIPHSLPGAVAASSGSPPGSALAAVASGGDLFPGQPVSELIAQLLRAEPYPAAAGRFGAGGGAAGAVLGIDNVCELAARLLFSTVEWARHAPFFPELPVADQVALLRLSWSELFVLNAAQAALPLHTAPLLAAAGLHAAPMAAERAVAFMDQVRAFQEQVDKLGRLQVDSAEYGCLKAIALFTPDACGLSDPAHVESLQEKAQVALTEYVRAQYPSQPQRFGRLLLRLPALRAVPASLISQLFFMRLVGKTPIETLIRDMLLSGSTFNWPYGSGQ

SEQ ID NO: 1225 - protein, 844 aa, Homo Sapiens
MGPGAPFARVGWPLPLLVVMAAGVAPVWASHSPHLPRPHSRVPPHPSSERRAVYIGALFPMSGGWPGGQACQPAVEMALEDVNSRRDILPDYELKLIHHDSKCDPGQATKYLYELLYNDPIKIILMPGCSSVSTLVAEAARMWNLIVLSYGSSSPALSNRQRFPTFFRTHPSATLHNPTRVKLFEKWGWKKIATIQQTTEVFTSTLDDLEERVKEAGIEITFRQSFFSDPAVPVKNLKRQDARIIVGLFYETEARKVFCEVYKERLFGKKYVWFLIGWYADNWFKIYDPSINCTVDEMTEAVEGHITTEIVMLNPANTRSISNMTSQEFVEKLTKRLKRHPEETGGFQEAPLAYDAIWALALALNKTSGGGGRSGVRLEDFNYNNQTITDQIYRAMNSSSFEGVSGHVVFDASGSRMAWTLIEQLQGGSYKKIGYYDSTKDDLSWSKTDKWIGGSPPADQTLVIKTFRFLSQKLFISVSVLSSLGIVLAVVCLSFNIYNSHVRYIQNSQPNLNNLTAVGCSLALAAVFPLGLDGYHIGRNQFPFVCQARLWLLGLGFSLGYGSMFTKIWWVHTVFTKKEEKKEWRKTLEPWKLYATVGLLVGMDVLTLAIWQIVDPLHRTIETFAKEEPKEDIDVSILPQLEHCSSRKMNTWLGIFYGYKGLLLLLGIFLAYETKSVSTEKINDHRAVGMAIYNVAVLCLITAPVTMILSSQQDAAFAFASLAIVFSSYITLVVLFVPKMRRLITRGEWQSEAQDTMKTGSSTNNNEEEKSRLLEKENRELEKIIAEKEERVSELRHQLQSRQQLRSRRHPPTPPEPSGGLPRGPPEPPDRLSCDGSRVHLLYK

SEQ ID NO: 1226 - protein, 306 aa, Homo Sapiens
MALVFEKCELATCTPREPGVAGGDVCSSDSFNEDIAVFAKQVRAEKPLFSSNPELDNLMIQAIQVLRFHLLELEKVHELCDNFCHRYISCLKGKMPIDLVIDERDGSSKSDHEELSGSSTNLADHNPSSWRDHDDATSTHSAGTPGPSSGGHASQSGDNSSEQGDGLDNSVASPGTGDDDDPDKDKKRQKKRGIFPKVATNIMRAWLFQHLTHPYPSEEQKKQLAQDTGLTILQVNNWFINARRRIVQPMIDQSNRAVSQGAAYSPEGQPMGSFVLDGQQHMGIRPAGPMSGMGMNMGMDGQWHYM

SEQ ID NO: 1227 - protein, 128 aa, Homo Sapiens
MTEADVNPKAYPLADAHLTKKLLDLVQQSCNYKQLRKGANEATKTLNRGISEFIVMAADAEPLEIILHLPLLCEDKNVPYVFVRSKQALGRACGVSRPVIACSVTIKEGSQLKQQIQSIQQSIERLLV

SEQ ID NO: 1228 - protein, 109 aa, Homo Sapiens [sequence omitted]

SEQ ID NO: 1229 - protein, 534 aa, Homo Sapiens
MKQEGSARRRGADKAKPPPGGGEQEPPPPPAPQDVEMKEEAATGGGSTGEADGKTAAAAAEHSQRELDTVTLEDIKEHVKQLEKAVSGKEPRFVLRALRMLPSTSRRLNHYVLYKAVQGFFTSNNATRDFLLPFLEEPMDTEADLQFRPRTGKAASTPLLPEVEAYLQLLVVIFMMNSKRYKEAQKISDDLMQKISTQNRRALDLVAAKCYYYHARVYEFLDKLDVVRSFLHARLRTATLRHDADGQATLLNLLLRNYLHYSLYDQAEKLVSKSVFPEQANNNEWARYLYYTGRIKAIQLEYSEARRTMTNALRKAPQHTAVGFKQTVHKLLIVVELLLGEIPDRLQFRQPSLKRSLMPYFLLTQAVRTGNLAKFNQVLDQFGEKFQADGTYTLIIRLRHNVIKTGVRMISLSYSRISLADIAQKLQLDSPEDAEFIVAKAIRDGVIEASINHEKGYVQSKEMIDIYSTREPQLAFHQRISFCLDIHNMSVKAMRFPPKSYNKDLESAEERREREQQDLEFAKEMAEDDDDSFP

SEQ ID NO: 1230 - protein, 793 aa, Homo Sapiens
MDSWFILVLLGSGLICVSANNATTVAPSVGITRLINSSTAEPVKEEAKTSNPTSSLTSLSVAPTFSPNITLGPTYLTTVNSSDSDNGTTRTASTNSIGITISPNGTWLPDNQFTDARTEPWEGNSSTAATTPETFPPSDETPIIAVMVALSSLLVIVFIIIVLYMLRFKKYKQAGSHSNSFRLSNGRTEDVEPQSVPLLARSPSTNRKYPPLPVDKLEEEINRRMADDNKLFREEFNALPACPIQATCEAASKEENKEKNRYVNILPYDHSRVHLTPVEGVPDSDYINASFINGYQEKNKFIAAQGPKEETVNDFWRMIWEQNTATIVMVTNLKERKECKCAQYWPDQGCWTYGNIRVSVEDVTVLVDYTVRKFCIQQVGDMTNRKPQRLITQFHFTSWPDFGVPFTPIGMLKFLKKVKACNPQYAGAIVVHCSAGVGRTGTFVVIDAMLDMMHTERKVDVYGFVSRIRAQRCQMVQTDMQYVFIYQALLEHYLYGDTELEVTSLETHLQKIYNKIPGTSNNGLEEEFKKLTSIKIQNDKMRTGNLPANMKKNRVLQIIPYEFNRVIIPVKRGEENTDYVNASFIDGYRQKDSYIASQGPLLHTIEDFWRMIWEWKSCSIVMLTELEERGQEKCAQYWPSDGLVSYGDITVELKKEEECESYTVRDLLVTNTRENKSRQIRQFHFHGWPEVGIPSDGKGMISIIAAVQKQQQQSGNHPITVHCSAGAGRTGTFCALSTVLERVKAEGILDVFQTVKSLRLQRPHMVQTLEQYEFCYKVVQEYIDAFSDYANFK

SEQ ID NO: 1231 - protein, 391 aa, Homo Sapiens
MAAVVENVVKLLGEQYYKDAMEQCHNYNARLCAERSVRLPFLDSQTGVAQSNCYIWMEKRHRGPGLASGQLYSYPARRWRKKRRAHPPEDPRLSFPSIKPDTDQTLKKEGLISQDGSSLEALLRTDPLEKRGAPDPRVDDDSLGEFPVTNSRARKRILEPDDFLDDLDDEDYEEDTPKRRGKGKSKGKGVGSARKKLDASILEDRDKPYACDICGKRYKNRPGLSYHYAHSHLAEEEGEDKEDSQPPTPVSQRSEEQKSKKGPDGLALPNNYCDFCLGDSKINKKTGQPEELVSCSDCGRSGHPSCLQFTPVMMAAVKTYRWQCIECKCCNICGTSENDDQLLFCDDCDRGYHMYCLTPSMSEPPEGSWSCHLCLDLLKEKASIYQNQNSS

SEQ ID NO: 1232 - protein, 340 aa, Homo Sapiens
METSALKQQEQPAATKIRNLPWVEKYRPQTLNDLISHQDILSTIQKFINEDRLPHLLLYGPPGTGKTSTILACAKQLYKDKEFGSMVLELNASDDRGIDIIRGPILSFASTRTIFKKGFKLVILDEADAMTQDAQNALRRVIEKFTENTRFCLICNYLSKIIPALQSRCTRFRFGPLTPELMVPRLEHVVEEEKVDISEDGMKALVTLSSGDMRRALNILQSTNMAFGKVTEETVYTCTGHPLKSDIANILDWMLNQDFTTAYRNITELKTLKGLALHDILTEIHLFVHRVDFPSSVRIHLLTKMADIEYRLSVGTNEKIQLSSLIAAFQVTRDLIVAEA

SEQ ID NO: 1233 - protein, 135 aa, Homo Sapiens [sequence omitted]

SEQ ID NO: 1234 - protein, 368 aa, Homo Sapiens
MSVAGLKKQFYKASQLVSEKVGGAEGTKLDDDFKEMEKKVDVTSKAVTEVLARTIEYLQPNPASRAKLTMLNTVSKIRGQVKNPGYPQSEGLLGECMIRHGKELGGESNFGDALLDAGESMKRLAEVKDSLDIEVKQNFIDPLQNLCEKDLKEIQHHLKKLEGRRLDFDYKKKRQGKIPDEELRQALEKFEESKEVAETSMHNLLETDIEQVSQLSALVDAQLDYHRQAVQILDELAEKLKRRMREASSRPKREYKPKPREPFDLGEPEQSNGGFPCTTAPKIAASSSFRSSDKPIRTPSRSMPPLDQPSCKALYDFEPENDGELGFHEGDVITLTNQIDENWYEGMLDGQSGFFPLSYVEVLVPLPQ

SEQ ID NO: 1235 - protein, 313 aa, Homo Sapiens
MLLLADMDVVNQLVAGGQFRVVKEPLGFVKVLQWVFAIFAFATCGSYSGELQLSVDCANKTESDLSIEVEFEYPFRLHQVYFDAPTCRGGTTKVFLVGDYSSSAEFFVTVAVFAFLYSMGALATYIFLQNKYRENNKGPMLDFLATAVFAFMWLVSSSAWAKGLSDVKMATDPENIIKEMPVCRQTGNTCKELRDPVTSGLNTSVVFGFLNLVLWVGNLWFVFKETGWAAPFLRAPPGAPEKQPAPGDAYGDAGYGQGPGGYGPQDSYGPQGGYQPDYGQPAGSGGSGYGPQGDYGQQGYGPQGAPTSFSNQM

SEQ ID NO: 1236 - protein, 320 aa, Homo Sapiens
MPTGDFDSKPSWADQVEEEGEDDKCVTSELLKGIPLATGDTSPEPELLPGAPLPPPKEVINGNIKTVTEYKIDEDGKKFKIVRTFRIETRKASKAVARRKNWKKFGNSEFDPPGPNVATTTVSDDVSMTFITSKEDLNCQEEEDPMNKLKGQKIVSCRICKGDHWTTRCPYKDTLGPMQKELAEQLGLSTGEKEKLPGELEPVQATQNKTGKYVPPSLRDGASRRGESMQPNRRADDNATIRVTNLSEDTRETDLQELFRPFGSISRIYLAKDKTTGQSKGFAFISFHRREDAARAIAGVSGFGYDHLILNVEWAKPSTN

SEQ ID NO: 1237 - protein, 2458 aa, Homo Sapiens
MSGSTQPVAQTWRATEPRYPPHSLSYPVQIARTHTDVGLLEYQHHSRDYASHLSPGSIIQPQRRRPSLLSEFQPGNERSQELHLRPESHSYLPELGKSEMEFIESKRPRLELLPDPLLRPSPLLATGQPAGSEDLTKDRSLTGKLEPVSPPSPPHTDPELELVPPRLSKEELIQNMDRVDREITMVEQQISKLKKKQQQLEEEAAKPPEPEKPVSPPPIESKHRSLVQIIYDENRKKAEAAHRILEGLGPQVELPLYNQPSDTRQYHENIKINQAMRKKLILYFKRRNHARKQWEQKFCQRYDQLMEAWEKKVERIENNPRRRAKESKVREYYEKQFPEIRKQRELQERMQRVGQRGSGLSMSAARSEHEVSEIIDGLSEQENLEKQMRQLAVIPPMLYDADQQRIKFINMNGLMADPMKVYKDRQVMNMWSEQEKETFREKFMQHPKNFGLIASFLERKTVAECVLYYYLTKKNENYKSLVRRSYRRRGKSQQQQQQQQQQQQQQQQQPMPRSSQEEKDEKEKEKEAEKEEEKPEVENDKEDLLKEKTDDTSGEDNDEKEAVASKGRKTANSQGRRKGRITRSMANEANSEEAITPQQSAELASMELNESSRWTEEEMETAKKGLLEHGRNWSAIARMVGSKTVSQCKNFYFNYKKRQNLDEILQQHKLKMEKERNARRKKKKAPAAASEEAAFPPVVEDEEMEASGVSGNEEEMVEEAEATVNNSSDTESIPSPHTEAAKDTGQNGPKPPATLGADGPPPGPPTPPPEDIPAPTEPTPASEATGAPTPPPAPPSPSAPPPVVPKEEKEEETAAAPPVEEGEEQKPPAAEELAVDTGKAEEPVKSECTEEAEEGPAKGKDAEAAEATAEGALKAEKKEGGSGRATTAKSSGAPQDSDSSATCSADEVDEAEGGDKNRLLSPRPSLLTPTGDPRANASPQKPLDLKQLKQRAAAIPPIQVTKVHEPPREDAAPTKPAPPAPPPPQNLQPESDAPQQPGSSPRGKSRSPAPPADKEAEKPVFFPAFAAEAQKLPGDPPCWTSGLPFPVPPREVIKASPHAPDPSAFSYAPPGHPLPLGLHDTARPVLPRPPTISNPPPLISSAKHPSVLERQIGAISQGMSVQLHVPYSEHAKAPVGPVTMGLPLPMDPKKLAPFSGVKQEQLSPRGQAGPPESLGVPTAQEASVLRGTALGSVPGGSITKGIPSTRVPSDSAITYRGSITHGTPADVLYKGTITRIIGEDSPSRLDRGREDSLPKGHVIYEGKKGHVLSYEGGMSVTQCSKEDGRSSSGPPHETAAPKRTYDMMEGRVGRAISSASIEGLMGRAIPPERHSPHHLKEQHHIRGSITQGIPRSYVEAQEDYLRREAKLLKREGTPPPPPPSRDLTEAYKTQALGPLKLKPAHEGLVATVKEAGRSIHEIPREELRHTPELPLAPRPLKEGSITQGTPLKYDTGASTTGSKKHDVRSLIGSPGRTFPPVHPLDVMADARALERACYEESLKSRPGTASSSGGSIARGAPVIVPELGKPRQSPLTYEDHGAPFAGHLPRGSPVTTREPTPRLQEGSLSSSKASQDRKLTSTPREIAKSPHSTVPEHHPHPISPYEHLLRGVSGVDLYRSHIPLAFDPTSIPRGIPLDAAAAYYLPRHLAPNPTYPHLYPPYLIRGYPDTAALENRQTIINDYITSQQMHHNAATAMAQRADMLRGLSPRESSLALNYAAGPRGIIDLSQVPHLPVLVPPTPGTPATAMDRLAYLPTAPQPFSSRHSSSPLSPGGPTHLTKPTTTSSSERERDRDRERDRDREREKSILTSTTTVEHAPIWRPGTEQSSGSSGGGGGSSSRPASHSHAHQHSPISPRTQDALQQRPSVLHNTGMKGIITAVEPSTPTVLRSTSTSSPVRPAATFPPATHCPLGGTLDGVYPTLMEPVLLPKEAPRVARPERPRADTGHAFLAKPPARSGLEPASSPSKGSEPRPLVPPVSGHATIARTPAKNLAPHHASPDPPAPPASASDPHREKTQSKPFSIQELELRSLGYHGSSYSPEGVEPVSPVSSPSLTHDKGLPKHLEELDKSHLEGELRPKQPGPVKLGGEAAHLPHLRPLPESQPSSSPLLQTAPGVKGHQRVVTLAQHISEVITQDYTRHHPQQLSAPLPAPLYSFPGASCPVLDLRRPPSDLYLPPPDHGAPARGSPHSEGGKRSPEPNKTSVLGGGEDGIEPVSPPEGMTEPGHSRSAVYPLLYRDGEQTEPSRMGSKSPGNTSQPPAFFSKLTESNSAMVKSKKQEINKKLNTHNRNEPEYNISQPGTEIFNMPAITGTGLMTYRSQAVQEHASTNMGLEAIIRKALMGGGGKAKVSGRPSSRKAKSPAPGLASGDRPPSVSSVHSEGDCNRRTPLTNRVWEDRPSSAGSTPFPYNPLIMRLQAGVMASPPPPGLPAGSGPLAGPHHAWDEEPKPLLCSQYETLSDSE

SEQ ID NO: 1238 - protein, 446 aa, Homo Sapiens
MEETIKDPPTSAVLLDHCHFSQVIFNSVEKFYIPGGDVTCHYTFTQHFIPRRKDWIGIFRVGWKTTREYYTFMWVTLPIDLNNKSAKQQEVQFKAYYLPKDDEYYQFCYVDEDGVVRGASIPFQFRPENEEDILVVTTQGEVEEIEQHNKELCKENQELKDSCISLQKQNSDMQAELQKKQEELETLQSINKKLELKVKEQKDYWETELLQLKEQNQKMSSENEKMGIRVDQLQAQLSTQEKEMEKLVQGDQDKTEQLEQLKKENDHLFLSLTEQRKDQKKLEQTVEQMKQNETTAMKKQQELMDENFDLSKRLSENEIICNALQRQKERLEGENDLLKRENSRLLSYMGLDFNSLPYQVPTSDEGGARQNPGLAYGNPYSGIQESSSPSPLSIKKCPICKADDICDHTLEQQQMQPLCFNCPICDKIFPATEKQIFEDHVFCHSL

SEQ ID NO: 1239 - protein, 349 aa, Homo Sapiens
MAHQTGIHATEELKEFFAKARAGSVRLIKVVIEDEQLVLGASQEPVGRWDQDYDRAVLPLLDAQQPCYLLYRLDSQNAQGFEWLFLAWSPDNSPVRLKMLYAATRATVKKEFGGGHIKDELFGTVKDDLSFAGYQKHLSSCAAPAPLTSAERELQQIRINEVKTEISVESKHQTLQGLAFPLQPEAQRALQQLKQKMVNYIQMKLDLERETIELVHTEPTDVAQLPSRVPRDAARYHFFLYKHTHEGDPLESVVFIYSMPGYKCSIKERMLYSSCKSRLLDSVEQDFHLEIAKKIEIGDGAELTAEFLYDEVHPKQHAFKQAFAKPKGPGGKRGHKRLIRGPGENGDDS

SEQ ID NO: 1240 - protein, 464 aa, Homo Sapiens
AGAELLADTSWSPAGRATEMKVKMLSRNPDNYVRETKLDLQRVPRNYDPALHPFEVPREYIRALNATKLERVFAKPFLASLDGHRDGVNCLAKHPEKLATVLSGSCDGEVRIWNLTQRNCIRTIQAHEGFVRGICTRFCGTSFFTVGDDKTVKQWKMDGPGYGDEEEPLHTILGKTVYTGIDHHWKEAVFATCGQQVDIWDEQRTNPICSMTWGFDSISSVKFNPIETFLLGSCASDRNIVLYDMRQATPLKKVILDMRTNTICWNPMEAFIFTAANEDYNLYTFDMRALDTPVMVHMDHVSAVLDVDYSPTGKEFVSASFDKSIRIFPVDKSRSREVYHTKRMQHVICVKWTSDSKYIMCGSDEMNIRLWKANASEKLGVLTSREKAAKDYNQKLKEKFQHYPHIKRIARHRHLPKSIYSQIQEQRIMKEARRRKEVNRIKHSKPGSVPLVSEKKKHVVAVVK

SEQ ID NO: 1241 - protein, 1337 aa, Homo Sapiens
MMQGNTCHRMSFHPGRGCPRGRGGHGARPSAPSFRPQNLRLLHPQQPPVQYQYEPPSAPSTTFSNSPAPNFLPPRPDFVPFPPPMPPSAQGPLPPCPIRPPFPNHQMRHPFPVPPCFPPMPPPMPCPNNPPVPGAPPGQGTFPFMMPPPSMPHPPPPPVMPQQVNYQYPPGYSHHNFPPPSFNSFQNNPSSFLPSANNSSSPHFRHLPPYPLPKAPSERRSPERLKHYDDHRHRDHSHGRGERHRSLDRRERGRSPDRRRQDSRYRSDYDRGRTPSRHRSYERSRERERERHRHRDNRRSPSLERSYKKEYKRSGSRSPSREKKRARWEEEKDRWSDNQSSGKDKNYTSIKEKEPEETMPDKNEEEEEELLKPVWIRCTHSENYYSSDPMDQVGDSTVVGTSRLRDLYDKFEEELGSRQEKAKAARPPWEPPKTKLDEDLESSSESECESDEDSTCSSSSDSEVFDVIAEIKRKKAHPDRLHDELWYNDPGQMNDGPLCKCSAKARRTGIRHSIYPGEEAIKPCRPMTNNAGRLFHYRITVSPPTNFLTDRPTVIEYDDHEYIFEGFSMFAHAPLTNIPLCKVIRFNIDYTIHFIEEMMPENFCVKGLELFSLFLFRDILELYDWNLKGPLFEDSPPCCPRFHFMPRFVRFLPDGGKEVLSMHQILLYLLRCSKALVPEEEIANMLQWEELEWQKYAEECKGMIVTNPGTKPSSVRIDQLDREQFNPDVITFPIIVHFGIRPAQLSYAGDPQYQKLWKSYVKLRHLLANSPKVKQTDKQKLAQREEALQKIRQKNTMRREVTVELSSQGFWKTGIRSDVCQHAMMLPVLTHHIRYHQCLMHLDKLIGYTFQDRCLLQLAMTHPSHHLNFGMNPDHARNSLSNCGIRQPKYGDRKVHHMHMRKKGINTLINIMSRLGQDDPTPSRINHNERLEFLGDAVVEFLTSVHLYYLFPSLEEGGLATYRTAIVQNQHLAMLAKKLELDRFMLYAHGPDLCRESDLRHAMANCFEALIGAVYLEGSLEEAKQLFGRLLFNDPDLREVWLNYPLHPLQLQEPNTDRQLIETSPVLQKLTEFEEAIGVIFTHVRLLARAFTLRTVGFNHLTLGHNQRMEFLGDSIMQLVATEYLFIHFPDHHEGHLTLLRSSLVNNRTQAKVAEELGMQEYAITNDKTKRPVALRTKTLADLLESFIAALYIDKDLEYVHTFMNVCFFPRLKEFILNQDWNDPKSQLQQCCLTLRTEGKEPDIPLYKTLQTVGPSHARTYTVAVYFKGERIGCGKGPSIQQAEMGAAMDALEKYNFPQMAHQKRFIERKYRQELKEMRWEREHQEREPDETEDIKK

SEQ ID NO: 1242 - protein, 342 aa, Homo Sapiens
MSRQAKDDFLRHYTVSDPRTHPKGYTEYKVTAQFISKKDPEDVKEVVVWKRYSDFRKLHGDLAYTHRNLFRRLEEFPAFPRAQVFGRFEASVIEERRKGAEDLLRFTVHIPALNNSPQLKEFFRGGEVTRPLEVSRDLHILPPPLIPTPPPDDPRLSQLLPAERRGLEELEVPVDPPPSSPAQEALDLLFNCESTEEASGSPARGPLTEAELALFDPFSKEEGAAPSPTHVAELATMEVESARLDQEPWEPGGQEEEEDGEGGPTPAYLSQATELITQALRDEKAGAYAAALQGYRDGVHVLLQGVPSDPLPARQEGVKKKAAEYLKRAEEILRLHLSQLPP

SEQ ID NO: 1243 - protein, 701 aa, Homo Sapiens
MVVSTFTDMDTFPNNFPPGGDSGLTGSQSEFQKMLIDERLRCEHHKANYQTLKAEHTRLQNEHVKLQNELKHLFNEKQTQQEKLQLLLEELRGELVEKTKDLEEMKLQILTPQKLELLRAQIQQELETPMRERFRNLDEEVEKYRAVYNKLRYEHTFLKSEFEHQKEEYARILDEGKIKYESEIARLEEDKEELRNQLLNVDLTKDSKRVEQLAREKVYLCQKLKGLEAEVAELKAEKENSEAQVENAQRIQVRQLAEMQATVRSLEAEKQSANLRAERLEKELQSSSEQNTFLINKLHKAEREINTLSSKVKELKHSNKLEITDIKLETARAKSELERERNKIQSELDGLQSDNEILKAAVEHHKVLLVEKDRELIRKVQAAKEEGYQKLVVLQDEKLELENRLADLEKMKVEHDVWRQSEKDQYEEKLRASQMAEEITRKELQSVRLKLQQQIVTIENAEKEKNENSDLKQQISSLQIQVTSLAQSENDLLNSNQMLKEMVERLKQECRNFRSQAEKAQLEAEKTLEEKQIQWLEEKHKLHERITDREEKYNQAKEKLQRAAIAQKKRKSLHENKLKRLQEKVEVLEAKKEELETENQVLNRQNVPFEDYTRLQKRLKDIQRRHNEFRSLILVPNMPPTASINPVSFQSSAMVPSMELPFPPHMQEEQHQRELSLLRKRLEELETTQRKQLEELGSSGE

SEQ ID NO: 1244 - protein, 341 aa, Homo Sapiens
MERAGPAGEEGGAREGRLLPRAPGAWVLRACAERAALEVGAASADTGVRGCGARGPAPLLASAGGGRARDGTWGVRTKGSGAALPSRPASRAAPRPEASSPPLPLEKARGGLSGPQGGRARGAMAHVGSRKRSRSRSRSRGRGSEKRKKKSRKDTSRNCSASTSQERSKQKARRRTRSSSSSSSSSSSSSSSSSSSSSSSSSDGRKKRGKYKDKRRKKKKKRKKLKKKGKEKAEAQQVEALPGPSLDQWHRSAGEEEDGPVLTDEQKSRIQAMKPMTKEEWDARQSIIRKVVDPETGRTRLIKGDGEVLEEIVTKERHREINKQATRGDCLAFQMRAGLLP

SEQ ID NO: 1245 - protein, 247 aa, Homo Sapiens
MSGKDRIEIFPSRMAQTIMKARLKGAQTGRNLLKKKSDALTLRFRQILKKIIETKMLMGEVMREAAFSLAEAKFTAGDFSTTVIQNVNKAQVKIRAKKDNVAGVTLPVFEHYHEGTDSYELTGLARGGEQLAKLKRNYAKAVELLVELASLQTSFVTLDEAIKITNRRVNAIEHVIIPRIERTLAYIITELDEREREEFYRLKKIQEKKKILKEKSEKDLEQRRAAGEVLEPANLLAEEKDEDLLFE

SEQ ID NO: 1246 - protein, 199 aa, Homo Sapiens
MAAANKGKCLPGVVGLAQALPVGPGRRAIAAGNKPRVRSIRFAAGHDAEGSHSHVHFDEKLHDSVVMVTQESDSSFLVKVGFLKILHRYEITFTLPPVHRLSKDVREAPVPSLHLKLLSVVPVPEGYSVKCEYSAHKEGVLKEEILLACEGGTGTCVRVTVQARVMDRHHGTPMLLDGVKCVGAELEYDSEHSDWHGFD

SEQ ID NO: 1247 - protein, 190 aa, Homo Sapiens
MGRGFRGTGSSPSRERPHSTSPLPDDSLFVASLSSPRAGVGLSRVPLRESGSVLPTYQSSPLVSGDTSWGPFRWLAPVQGLRAWGRGLRVPTCRRGHRQYLRSGPDYDFARYRSTVHGVTQAFAAASREVLAVEAELGGPRRQPLLAGHVRSLQELEQTRLGTVALLQLMETPELAGQEDAVRMQQLKMK

SEQ ID NO: 1248 - protein, 194 aa, Homo Sapiens
MAKRRAAEPVTFHVPWKRLLLCDFAEQPPPPPLWIRPPGVAHAGQLLGVPEQHRKRKIDAGTMAEPSASPSKRRDSGDNSAPSGQEREDHGLETGDPPLPPPPVLPGPGEELPGARLPGGGGDDGAGRAGPPRGDWGVASRQHNEEFWQYNTFQYWRNPLPPIDLADIEDLSEDTLTEATLQGRNEGAEVDMES

SEQ ID NO: 1249 - protein, 120 aa, Homo Sapiens
MESKEELAANNLNGENAQQENEGGEQAPTQNEEESRHLGGGEGQKPGGNIRRGRVRRLVPNFRWAIPNRHIEHNEARDDVERFVGQMMEIKRKTREQQMRHYMRFQTPEPDNHYDFCLIP

SEQ ID NO: 1250 - protein, 769 aa, Homo Sapiens
MGCNMCVVQKPEEQYKVMLQVNGKELSKLSQEQTLQALRSSKEPLVIQVLRRSPRLRGDSSCHDLQLVDSGTQTDITFEHIMALGKLRPPTPPMVILEPPPISHEYYDPAEFMEGGPQEADRLDELEYEEVELYKSSHRDKLGLMVCYRTDDEEDLGIYVGEVNPNSIAAKDGRIREGDRIIQINGVDVQNREEAVAILSQEENTNISLLVARPESQLAKRWKDSDRDDFLDDFGSENEGELRARKLKSPPAQQPGNEEEKGAPDAGPGLSNSQELDSGVGRTDESTRNEESSEHDLLGDEPPSSTNTPGSLRKFGLQGDALQSRDFHFSMDSLLAEGAGLGGGDVPGLTDEEYERYRELLEIKCHLENGNQLGLLFPRASGGNSALDVNRNESLGHEMAMLEEELRHLEFKCRNILRAQKMQQLRERCMKAWLLEEESLYDLAASEPKKHELSDISELPEKSDKDSTSAYNTGESCRSTPLLVEPLPESPLRRAMAGNSNLNRTPPGPAVATPAKAAPPPGSPAKFRSLSRDPEAGRRQHAEERGRRNPKTGLTLERVGPESSPYLSRRHRGQGQEGEHYHSCVQLAPTRGLEELGHGPLSLAGGPRVGGVAAAATEAPRMEWKVKVRSDGTRYVAKRPVRDRLLKARALKIREERSGMTTDDDAVSEMKMGRYWSKEERKQHLIRAREQRKRREFMMQSRLECLREQQNGDSKPELNIIALSHRKTMKKRNKKILDNWITIQEMLAHGARSADGKRVYNPLLSVTTV

SEQ ID NO: 1251 - protein, 545 aa, Homo Sapiens
MAMMVFPREEKLSQDEIVLGTKAVIQGLETLRGEHRALLAPLVAPEAGEAEPGSQERCILLRRSLEAIELGLGEAQEEKGDVPKDTLDDLFPNEDEQSPAPSPGGGDVSGQHGGYEIPARLRTLHNLVIQYASQGRYEVAVPLCKQALEDLEKTSGHDHPDVATMLNILALVYRDQNKYKEAAHLLNDALAIREKTLGKDHPAVAATLNNLAVLYGKRGKYKEAEPLCKRALEIREKVLGKFHPDVAKQLSNLALLCQNQGKAEEVEYYYRRALEIYATRLGPDDPNVAKTKNNLASCYLKQGKYQDAETLYKEILTRAHEKEFGSVNGDNKPIWMHAEEREESKDKRRDSAPYGEYGSWYKACKVDSPTVNTTLRSLGALYRRQGKLEAAHTLEDCASRNRKQGLDPASQTKVVELLKDGSGRRGDRRSSRDMAGGAGPRSESDLEDVGPTAEWNGDGSGSLRRSGSFGKLRDALRRSSEMLVKKLQGGTPQEPPNPRMKRASSLNFLNKSVEEPTQPGGTGLSDSRTLSSSSMDLSRRSSLVG

SEQ ID NO: 1252 - protein, 215 aa, Homo Sapiens
MEKLYSENEGMASNQGKMENEEQPQDERKPEVTCTLEDKKLENEGKTENKGKTGDEEMLKDKGKPESEGEAKEGKSEREGESEMEGGSEREGKPEIEGKPESEGEPGSETRAAGKRPAEDDVPRKAKRKTNKGLAHYLKEYKEAIHDMNFSNEDMIREFDNMAKVQDEKRKSKQKLGAFLWMQRNLQDPFYPRGPREFRGGCRAPRRDIEDIPYV

SEQ ID NO: 1253 - protein, 199 aa, Homo Sapiens [sequence omitted]

SEQ ID NO: 1254 - protein, 378 aa, Homo Sapiens
MDPGDDWLVESLRLYQDFYAFDLSGATRVLEWIDDKGVFVAGYESLKKNEILHLKLPLRLSVKENKGLFPERDFKVRHGGFSDRSIFDLKHVPHTRLLVTSGLPGCYLQVWQVAEDSDVIKAVSTIAVHEKEESLWPRVAVFSTLAPGVLHGARLRSLQVVDLESRKTTYTSDVSDSEELSSLQVLDADTFAFCCASGRLGLVDTRQKWAPLENRSPGPGSGGERWCAEVGSWGQGPGPSIASLGSDGRLCLLDPRDLCHPVSSVQCPVSVPSPDPELLRVTWAPGLKNCLAISGFDGTVQVYDATSWDGTRSQDGTRSQVEPLFTHRGHIFLDGNGMDPAPLVTTHTWHPCRPRTLLSATNDASLHVWDWVDLCAPR

SEQ ID NO: 1255 - protein, 747 aa, Homo Sapiens
METAEKECGALGGLFQAIVNDMKSSYPIWEDFNSKATKLHSQLRTTVLAAVAFLDAFQKVADMATNTRGATRDIGSALTRMCMRHRSIETKLRQFTNALLESLINPLQERIEDWKKAANQLDKDHAKEYKRARHEIKKKSSDTLKLQKKARKELLGKGDLQPQLDSALQDVNDMYLLLEETEKQAVRRALIEERGRFCTFITFLQPVVNGELTMLGEITHLQGIIDDLVVLTAEPHKLPPASEQVIKDLKGSDYSWSYQTPPSSPSSSSSRKSSMCSAPSSSSSAKGGGAPWPGGAQTYSPSSTCRYRSLAQPATTTARLSSVSSHDSGFVSQDATYSKPPSPMPSDITSQKSSSSASSEASETCQSVSECSSPTSDWSKVGSHEQPSGATLQRRKDRVELLRDTEPGPASGGTLGPSGEEAPRPRMSPATIAAKHGEEVSPAASDLAMVLTRGLSLEHQKSSRDSLQYSSGYSTQTTTPSCSEDTIPSQGSDYDCYSVNGDADSEGPPEFDKSSTIPRNSNIAQNYRRLIQTKRPASTAGLPTAGLPTATGLPSGAPPGVATIRRTPSTKPTVRRALSSAGPIPIRPPIVPVKTPTVPDSPGYMGPTRAGSEECVFYTDETASPLAPDLAKASPKRLSLPNTAWGSPSPEAAGYPGAGAEDEQQQLAANRHSLVEKLGELVAGAHALGEGQFPFPTALSATPTEETPTPPPAATSDPPAEDMLVAIRRGVRLRRTVTNDRSAPRIL

SEQ ID NO: 1256 - protein, 340 aa, Homo Sapiens
MAASSSEISEMKGVEESPKVPGEGPGHSEAETGPPQVLAGVPDQPEAPQPGPNTTAAPVDSGPKAGLAPETTETPAGASETAQATDLSLSPGGESKANCSPEDPCQETVSKPEVSKEATADQGSRLESAAPPEPAPEPAPQPDPRPDSQPTPKPALQPELPTQEDPTPEILSESVGEKQENGAVVPLQAGDGEEGPAPEPHSPPSKKSPPANGAPPRVLQQLVEEDRMRRAHSGHPGSPRGSLSRHPSSQLAGPGVEGGEGTQKPRDYIILAILSCFCPMWPVNIVAFAYAVMSRNSLQQGDVDGAQRLGRVAKLLSIVALVGGVLIIIASCVINLGVYK

SEQ ID NO: 1257 - protein, 215 aa, Homo Sapiens
MPFHPVTAALMYRGIYTVPNLLSEQRPVDIPEDELEEIREAFKVFDRDGNGFISKQELGTAMRSLGYMPNEVELEVIIQRLDMDGDGQVDFEEFVTLLGPKLSTSGIPEKFHGTDFDTVFWKCDMQKLTVDELKRLLYDTFCEHLSMKDIENIIMTEEESHLGTAEECPVDVETCSNQQIRQTCVRKSLICAFAIAFIISVMLIAANQVLRSGMK

SEQ ID NO: 1258 - protein, 403 aa, Homo Sapiens
MEEERGSALAAESALEKNVAELTVMDVYDIASLVGHEFERVIDQHGCEAIARLMPKVVRVLEILEVLVSRHHVAPELDELRLELDRLRLERMDRIEKERKHQKELELVEDVWRGEAQDLLSQIAQLQEENKQLMTNLSHKDVNFSEEEFQKHEGMSERERQVMKKLKEVVDKQRDEIRAKDRELGLKNEDVEALQQQQTRLMKINHDLRHRVTVVEAQGKALIEQKVELEADLQTKEQEMGSLRAELGKLRERLQGEHSQNGEEEPETEPVGEESISDAEKVAMDLKDPNRPRFTLQELRDVLHERNELKSKVFLLQEELAYYKSEEMEEENRIPQPPPIAHPRTSPQPESGIKRLFSFFSRDKKRLANTQRNVHIQESFGQWANTHRDDGYTEQGQEALQHL

SEQ ID NO: 1259 - protein, 204 aa, Homo Sapiens
MAEQEPTAEQLAQIAAENEEDEHSVNYKPPAQKSIQEIQELDKDDESLRKYKEALLGRVAVSADPNVPNVVVTGLTLVCSSAPGPLELDLTGDLESFKKQSFVLKEGVEYRIKISFRVNREIVSGMKYIQHTYRKGVKIDKTDYMVGSYGPRAEEYEFLTPVEEAPKGMLARGSYSIKSRFTDDDKTDHLSWEWNLTIKKDWKD

SEQ ID NO: 1260 - protein, 412 aa, Homo Sapiens
MQPSSLLPLALCLLAAPASALVRIPLHKFTSIRRTMSEVGGSVEDLIAKGPVSKYSQAVPAVTEGPIPEVLKNYMDAQYYGEIGIGTPPQCFTVVFDTGSSNLWVPSIHCKLLDIACWIHHKYNSDKSSTYVKNGTSFDIHYGSGSLSGYLSQDTVSVPCQSASSASALGGVKVERQVFGEATKQPGITFIAAKFDGILGMAYPRISVNNVLPVFDNLMQQKLVDQNIFSFYLSRDPDAQPGGELMLGGTDSKYYKGSLSYLNVTRKAYWQVHLDQVEVASGLTLCKEGCEAIVDTGTSLMVGPVDEVRELQKAIGAVPLIQGEYMIPCEKVSTLPAITLKLGGKGYKLSPEDYTLKVSQAGKTLCLSGFMGMDIPPPSGPLWILGDVFIGRYYTVFDRDNNRVGFAEAARL

SEQ ID NO: 1261 - protein, 437 aa, Homo Sapiens
MALAGAPAGGPCAPALEALLGAGALRLLDSSQIVIISAAQDASAPPAPTGPAAPAAGPCDPDLLLFATPQAPRPTPSAPRPALGRPPVKRRLDLETDHQYLAESSGPARGRGRHPGKGVKSPGEKSRYETSLNLTTKRFLELLSHSADGVVDLNWAAEVLKVQKRRIYDITNVLEGIQLIAKKSKNHIQWLGSHTTVGVGGRLEGLTQDLRQLQESEQQLDHLMNICTTQLRLLSEDTDSQRLAYVTCQDLRSIADPAEQMVMVIKAPPETQLQAVDSSENFQISLKSKQGPIDVFLCPEETVGGISPGKTPSQEVTSEEENRATDSATIVSPPPSSPPSSLTTDPSQSLLSLEQEPLLSRMGSLRAPVDEDRLSPLVAADSLLEHVREDFSGLLPEEFISLSPPHEALDYHFGLEEGEGIRDLFDCDFGDLTPLDF

SEQ ID NO: 1262 - protein, 785 aa, Homo Sapiens
MLVAGLLLWASLLTGAWPSFPTQDHLPATPRVRLSFKELKATGTAHFFNFLLNTTDYRILLKDEDHDRMYVGSKDYVLSLDLHDINREPLIIHWAASPQRIEECVLSGKDVNGECGNFVRLIQPWNRTHLYVCGTGAYNPMCTYVNRGRRAQATPWTQTQAVRGRGSRATDGALRPMPTAPRQDYIFYLEPERLESGKGKCPYDPKLDTASALINEELYAGVYIDFMGTDAAIFRTLGKQTAMRTDQYNSRWLNDPSFIHAELIPDSAERNDDKLYFFFRERSAEAPQSPAVYARIGRICLNDDGGHCCLVNKWSTFLKARLVCSVPGEDGIETHFDELQDVFVQQTQDVRNPVIYAVFTSSGSVFRGSAVCVYSMADIRMVFNGPFAHKEGPNYQWMPFSGKMPYPRPGTCPGGTFTPSMKSTKDYPDEVINFMRSHPLMYQAVYPLQRRPLVVRTGAPYRLTTIAVDQVDAADGRYEVLFLGTDRGTVQKVIVLPKDDQELEELMLEEVEVFKDPAPVKTMTISSKRQQLYVASAVGVTHLSLHRCQAYGAACADCCLARDPYCAWDGQACSRYTASSKRRSRRQDVRHGNPIRQCRGFNSNANKNAVESVQYGVAGSAAFLECQPRSPQATVKWLFQRDPGDRRREIRAEDRFLRTEQGLLLRALQLSDRGLYSCTATENNFKHVVTRVQLHVLGRDAVHAALFPPLSMSAPPPPGAGPPTPPYQELAQLLAQPEVGLIHQYCQGYWRHVPPSPREAPGAPRSPEPQDQKKPRNRRHHPPDT

SEQ ID NO: 1263 - protein, 1479 aa, Homo Sapiens
MAKRSRGPGRRCLLALVLFCAWGTLAVVAQKPGAGCPSRCLCFRTTVRCMHLLLEAVPAVAPQTSILDLRFNRIREIQPGAFRRLRNLNTLLLNNNQIKRIPSGAFEDLENLKYLYLYKNEIQSIDRQAFKGLASLEQLYLHFNQIETLDPDSFQHLPKLERLFLHNNRITHLVPGTFNHLESMKRLRLDSNTLHCDCEILWLADLLKTYAESGNAQAAAICEYPRRIQGRSVATITPEELNCERPRITSEPQDADVTSGNTVYFTCRAEGNPKPEIIWLRNNNELSMKTDSRLNLLDDGTLMIQNTQETDQGIYQCMAKNVAGEVKTQEVTLRYFGSPARPTFVIQPQNTEVLVGESVTLECSATGHPPPRISWTRGDRTPLPVDPRVNITPSGGLYIQNVVQGDSGEYACSATNNIDSVHATAFIIVQALPQFTVTPQDRVVIEGQTVDFQCEAKGNPPPVIAWTKGGSQLSVDRRHLVLSSGTLRISGVALHDQGQYECQAVNIIGSQKVVAHLTVQPRVTPVFASIPSDTTVEVGANVQLPCSSQGEPEPAITWNKDGVQVTESGKFHISPEGFLTINDVGPADAGRYECVARNTIGSASVSMVLSVNVPDVSRNGDPFVATSIVEAIATVDRAINSTRTHLFDSRPRSPNDLLALFRYPRDPYTVEQARAGEIFERTLQLIQEHVQHGLMVDLNGTSYHYNDLVSPQYLNLIANLSGCTAHRRVNNCSDMCFHQKYRTHDGTCNNLQHPMWGASLTAFERLLKSVYENGFNTPRGINPHRLYNGHALPMPRLVSTTLIGTETVTPDEQFTHMLMQWGQFLDHDLDSTVVALSQARFSDGQHCSNVCSNDPPCFSVMIPPNDSRARSGARCMFFVRSSPVCGSGMTSLLMNSVYPREQINQLTSYIDASNVYGSTEHEARSIRDLASHRGLLRQGIVQRSGKPLLPFATGPPTECMRDENESPIPCFLAGDHRANEQLGLTSMHTLWFREHNRIATELLKLNPHWDGDTIYYETRKIVGAEIQHITYQHWLPKILGEVGMRTLGEYHGYDPGINAGIFNAFATAAFRFGHTLVNPLLYRLDENFQPIAQDHLPLHKAFFSPFRIVNEGGIDPLLRGLFGVAGKMRVPSQLLNTELTERLFSMAHTVALDLAAINIQRGRDHGIPPYHDYRVYCNLSAAHTFEDLKNEIKNPEIREKLKRLYGSTLNIDLFPALVVEDLVPGSRLGPTLMCLLSTQFKRLRDGDRLWYENPGVFSPAQLTQIKQTSLARILCDNADNITRVQSDVFRVAEFPHGYGSCDEIPRVDLRVWQDCCEDCRTRGQFNAFSYHFRGRRSLEFSYQEDKPTKKTRPRKIPSVGRQGEHLSNSTSAFSTRSDASGTNDFREFVLEMQKTITDLRTQIKKLESRLSTTECVDAGGESHANNTKWKKDACTICECKDGQVTCFVEACPPATCAVPVNIPGACCPVCLQKRAEEKP

SEQ ID NO: 1264 - protein, 547 aa, Homo Sapiens
MFYYPNVLQRHTGCFATIWLAATRGSRLVKREYLRVNVVKTCEEILNYVLVRVQPPQPGLPRPRFSLYLSAQLQIGVIRVYSQQCQYLVEDIQHILERLHRAQLQIRIDMETELPSLLLPNHLAMMETLEDAPDPFFGMMSVDPRLPSPFDIPQIRHLLEAAIPERVEEIPPEVPTEPREPERIPVTVLPPEAITILEAEPIRMLEIEGERELPEVSRRELDLLIAEEEEAILLEIPRLPPPAPAEVEGIGEALGPEELRLTGWEPGALLMEVTPPEELRLPAPPSPERRPPVPPPPRRRRRRRLLFWDKETQISPEKFQEQLQTRAHCWECPMVQPPERTIRGPAELFRTPTLSGWLPPELLGLWTHCAQPPPKALRRELPEEAAAEEERRKIEVPSEIEVPREALEPSVPLMVSLEISLEAAEEEKSRISLIPPEERWAWPEVEAPEAPALPVVPELPEVPMEMPLVLPPELELLSLEAVHRAVALELQANREPDFSSLVSPLSPRRMAARVFYLLLVLSAQQILHVKQEKPYGRLLIQPGPRFH

SEQ ID NO: 1265 - protein, 325 aa, Homo Sapiens
MAASCVLLHTGQKMPLIGLGTWKSEPGQVKAAVKYALSVGYRHIDCAAIYGNEPEIGEALKEDVGPGKAVPREELFVTSKLWNTKHHPEDVEPALRKTLADLQLEYLDLYLMHWPYAFERGDNPFPKNADGTICYDSTHYKETWKALEALVAKGLVQALGLSNFNSRQIDDILSVASVRPAVLQVECHPYLAQNELIAHCQARGLEVTAYSPLGSSDRAWRDPDEPVLLEEPVVLALAEKYGRSPAQILLRWQVQRKVICIPKSITPSRILQNIKVFDFTFSPEEMKQLNALNKNWRYIVPMLTVDGKRVPRDAGHPLYPFNDPY

SEQ ID NO: 1266 - protein, 199 aa, Homo Sapiens
MALNGAEVDDFSWEPPTEAETKVLQARRERQDRISRLMGDYLLRGYRMLGETCADCGTILLQDKQRKIYCVACQELDSDVDKDNPALNAQAALSQAREHQLASASELPLGSRPAPQPPVPRPEHCEGAAAGLKAAQGPPAPAVPPNTDVMACTQTALLQKLTWASAELGSSTSLETSIQLCGLIRACAEALRSLQQLQH

SEQ ID NO: 1267 - protein, 178 aa, Homo Sapiens
MSEVRLPPLRALDDFVLGSARLAAPDPCDPQRWCHRVINNLLYYQTNYLLCFGIGLALAGYVRPLHTLLSALVVAVALGVLVWAAETRAAVRRCRRSHPAACLAAVLAVGLLVLWVAGGACTFLFSIAGPVLLILVHASLRLRNLKNKIENKIESIGLKRTPMGLLLEALGQEQEAGS

SEQ ID NO: 1268 - protein, 136 aa, Homo Sapiens
MAGAGSAAVSGAGTPVAGPTGRDLFAEGLLEFLRPAVQQLDSHVHAVRESQVELREQIDNLATELCRINEDQKVALDLDPYVKKLLNARRRVVLVNNILQNAQERLRRLNHSVAKETARRRAMLDSGIYPPGSPGK

SEQ ID NO: 1269 - protein, 442 aa, Homo Sapiens
MASVVLPSGSQCAAAAAAAAPPGLRLRLLLLLFSAAALIPTGDGQNLFTKDVTVIEGEVATISCQVNKSDDSVIQLLNPNRQTIYFRDFRPLKDSRFQLLNFSSSELKVSLTNVSISDEGRYFCQLYTDPPQESYTTITVLVPPRNLMIDIQKDTAVEGEEIEVNCTAMASKPATTIRWFKGNTELKGKSEVEEWSDMYTVTSQLMLKVHKEDDGVPVICQVEHPAVTGNLQTQRYLEVQYKPQVHIQMTYPLQGLTREGDALELTCEAIGKPQPVMVTWVRVDDEMPQHAVLSGPNLFINNLNKTDNGTYRCEASNIVGKAHSDYMLYVYDPPTTIPPPTTTTTTTTTTTTTILTIITDSRAGEEGSIRAVDHAVIGGVVAVVVFAMLCLLIILGRYFARHKGTYFTHEAKGADDAADADTAIINAEGGQNNSEEKKEYFI

SEQ ID NO: 1270 - protein, 547 aa, Homo Sapiens
MTKTDPAPMAPPPRGEEEEEEEEDEPVPEAPSPTQERRQKPVVHPSAPAPLPKDYAFTFFDPNDPACQEILFDPQTTIPELFAIVRQWVPQVQHKIDVIGNEILRRGCHVNDRDGLTDMTLLHYACKAGAHGVGDPAAAVRLSQQLLALGADVTLRSRWTNMNALHYAAYFDVPDLVRVLLKGARPRVVNSTCSDFNHGSALHIAASSLCLGAAKCLLEHGANPALRNRKGQVPAEVVPDPMDMSLDKAEAALVAKELRTLLEEAVPLSCALPKVTLPNYDNVPGNLMLSALGLRLGDRVLLDGQKTGTLRFCGTTEFASGQWVGVELDEPEGKNDGSVGGVRYFICPPKQGLFASVSKISKAVDAPPSSVTSTPRTPRMDFSRVTGKGRREHKGKKKTPSSPSLGSLQQRDGAKAEVGDQVLVAGQKQGIVRFYGKTDFAPGYWYGIELDQPTGKHDGSVFGVRYFTCPPRHGVFAPASRIQRIGGSTDSPGDSVGAKKVHQVTMTQPKRTFTTVRTPKDIASENSISRLLFCCWFPWMLRAEMQS

SEQ ID NO: 1271 - protein, 282 aa, Homo Sapiens
MSGSSLPSALALSLLLVSGSLLPGPGAAQNEPRIVTSEEVIIRDSPVLPVTLQCNLTSSSHTLTYSYWTKNGVELSATRKNASNMEYRINKPRAEDSGEYHCVYHFVSAPKANATIEVKAAPDITGHKRSENKNEGQDATMYCKSVGYPHPDWIWRKKENGMPMDIVNTSGRFFIINKENYTELNIVNLQITEDPGEYECNATNAIGSASVVTVLRVRSHLAPLWPFLGILAEIIILVVIIVVYEKRKRPDEVPDDDEPAGPMKTNSTNNHKDKNLRQRNTN

SEQ ID NO: 1272 - protein, 229 aa, Homo Sapiens
MTTAARPTFEPARGGRGKGEGDLSQLSKQYSSRDLPSHTKIKYRQTTQDAPEEVRNRDFRRELEERERAAAREKNRDRPTREHTTSSSVSKKPRLDQIPAANLDADDPLTDEEDEDFEEESDDDDTAALLAELEKIKKERAEEQARKEQEQKAEEERIRMENILSGNPLLNLTGPSQPQANFKVKRRWDDDVVFKNCAKGVDDQKKDKRFVNDTLRSEFHKKFMEKYIK

SEQ ID NO: 1273 - protein, 157 aa, Homo Sapiens [sequence omitted]

SEQ ID NO: 1274 - protein, 1301 aa, Homo Sapiens
MTMGDMKTPDFDDLLAAFDIPDMVDPKAAIESGHDDHESHMKQNAHGEDDSHAPSSSDVGVSVIVKNVRNIDSSEGGEKDGHNPTGNGLHNGFLTASSLDSYSKDGAKSLKGDVPASEVTLKDSTFSQFSPISSAEEFDDDEKIEVDDPPDKEDMRSSFRSNVLTGSAPQQDYDKLKALGGENSSKTGLSTSGNVEKNKAVKRETEASSINLSVYEPFKVRKAEDKLKESSDKVLENRVLDGKLSSEKNDTSLPSVAPSKTKSSSKLSSCIAAIAALSAKKAASDSCKEPVANSRESSPLPKEVNDSPRAADKSPESQNLIDGTKKPSLKQPDSPRSISSENSSKGSPSSPAGSTPAIPKVRIKTIKTSSGEIKRTVTRVLPEVDLDSGKKPSEQTASVMASVTSLLSSPASAAVLSSPPRAPLQSAVVTNAVSPAELTPKQVTIKPVATAFLPVSAVKTAGSQVINLKLANNTTVKATVISAASVQSASSAIIKAANAIQQQTVVVPASSLANAKLVPKTVHLANLNLLPQGAQATSELRQVLTKPQQQIKQAIINAAASQPPKKVSRVQVVSSLQSSVVEAFNKVLSSVNPVPVYIPNLSPPANAGITLPTRGYKCLECGDSFALEKSLTQHYDRRSVRIEVTCNHCTKNLVFYNKCSLLSHARGHKEKGVVMQCSHLILKPVPADQMIVSPSSNTSTSTSTLQSPVGAGTHTVTKIQSGITGTVISAPSSTPITPAMPLDEDPSKLCRHSLKCLECNEVFQDETSLATHFQQAADTSGQKTCTICQMLLPNQCSYASHQRIHQHKSPYTCPECGAICRSVHFQTHVTKNCLHYTRRVGFRCVHCNVVYSDVAALKSHIQGSHCEVFYKCPICPMAFKSAPSTHSHAYTQHPGIKIGEPKIIYKCSMCDTVFTLQTLLYRHFDQHIENQKVSVFKCPDCSLLYAQKQLMMDHIKSMHGTLKSIEGPPNLGINLPLSIKPATQNSANQNKEDTKSMNGKEKLEKKSPSPVKKSMETKKVASPGWTCWECDCLFMQRDVYISHVRKEHGKQMKKHPCRQCDKSFSSSHSLCRHNRIKHKGIRKVYACSHCPDSRRTFTKRLMLEKHVQLMHGIKDPDLKEMTDATNEEETEIKEDTKVPSPKRKLEEPVLEFRPPRGAITQPLKKLKINVFKVHKCAVCGFTTENLLQFHEHIPQHKSDGSSYQCRECGLCYTSHVSLSRHLFIVHKLKEPQPVSKQNGAGEDNQQENKPSHEDESPDGAVSDRKCKVCAKTFETEAALNTHMRTHGMAFIKSKRMSSAEK

SEQ ID NO: 1275 - protein, 826 aa, Homo Sapiens
MVAPVLETSHVFCCPNRVRGVLNWSSGPRGLLAFGTSCSVVLYDPLKRVVVTNLNGHTARVNCIQWICKQDGSPSTELVSGGSDNQVIHWEIEDNQLLKAVHLQGHEGPVYAVHAVYQRRTSDPALCTLIVSAAADSAVRLWSKKGPEVMCLQTLNFGNGFALALCLSFLPNTDVPILACGNDDCRIHIFAQQNDQFQKVLSLCGHEDWIRGVEWAAFGRDLFLASCSQDCLIRIWKLYIKSTSLETQDDDNIRLKENTFTIENESVKIAFAVTLETVLAGHENWVNAVHWQPVFYKDGVLQQPVRLLSASMDKTMILWAPDEESGVWLEQVRVGEVGGNTLGFYDCQFNEDGSMIIAHAFHGALHLWKQNTVNPREWTPEIVISGHFDGVQDLVWDPEGEFIITVGTDQTTRLFAPWKRKDQSQVTWHEIARPQIHGYDLKCLAMINRFQFVSGADEKVLRVFSAPRNFVENFCAITGQSLNHVLCNQDSDLPEGATVPALGLSNKAVFQGDIASQPSDEEELLTSTGFEYQQVAFQPSILTEPPTEDHLLQNTLWPEVQKLYGHGYEIFCVTCNSSKTLLASACKAAKKEHAAIILWNTTSWKQVQNLVFHSLTVTQMAFSPNEKFLLAVSRDRTWSLWKKQDTISPEFEPVFSLFAFTNKITSVHSRIIWSCDWSPDSKYFFTGSRDKKVVVWGECDSTDDCIEHNIGPCSSVLDVGGAVTAVSVCPVLHPSQRYVVAVGLECGKICLYTWKKTDQVPEINDWTHCVETSQSQSHTLAIRKLCWKNCSGKTEQKEAEGAEWLHFASCGEDHTVKIHRVNKCAL

SEQ ID NO: 1276 - protein, 704 aa, Homo Sapiens
MANENHGSPREEASLLSHSPGTSNQSQPCSPKPIRLVQDLPEELVHAGWEKCWSRRENRPYYFNRFTNQSLWEMPVLGQHDVISDPLGLNATPLPQDSSLVETPPAENKPRKRQLSEEQPSGNGVKKPKIEIPVTPTGQSVPSSPSIPGTPTLKMWGTSPEDKQQAALLRPTEVYWDLDIQTNAVIKHRGPSEVLPPHPEVELLRSQLILKLRQHYRELCQQREGIEPPRESFNRWMLERKVVDKGSDPLLPSNCEPVVSPSMFREIMNDIPIRLSRIKFREEAKRLLFKYAEAARRLIESRSASPDSRKVVKWNVEDTFSWLRKDHSASKEDYMDRLEHLRRQCGPHVSAAAKDSVEGICSKIYHISLEYVKRIREKHLAILKENNISEEVEAPEVEPRLVYCYPVRLAVSAPPMPSVEMHMENNVVCIRYKGEMVKVSRNYFSKLWLLYRYSCIDDSAFERFLPRVWCLLRRYQMMFGVGLYEGTGLQGSLPVHVFEALHRLFGVSFECFASPLNCYFRQYCSAFPDTDGYFGSRGPCLDFAPLSGSFEANPPFCEELMDAMVSHFERLLESSPEPLSFIVFIPEWREPPTPALTRMEQSRFKRHQLILPAFEHEYRSGSQHICKKEEMHYKAVHNTAVLFLQNDPGFAKWAPTPERLQELSAAYRQSGRSHSSGSSSSSSSEAKDRDSGREQGPSREPHPT

SEQ ID NO: 1277 - protein, 445 aa, Homo Sapiens
MLPWTALGLALSLRLALARSGAERGPPASAPRGDLMFLLDSSASVSHYEFSRVREFVGQLVAPLPLGTGALRASLVHVGSRPYTEFPFGQHSSGEAAQDAVRASAQRMGDTHTGLALVYAKEQLFAEASGARPGVPKVLVWVTDGGSSDPVGPPMQELKDLGVTVFIVSTGRGNFLELSAAASAPAEKHLHFVDVDDLHIIVQELRGSILDAMRPQQLHATEITSSGFRLAWPPLLTADSGYYVLELVPSAQPGAARRQQLPGNATDWIWAGLDPDTDYDVALVPESNVRLLRPQILRVRTRPGEAGPGASGPESGAGPAPTQLAALPAPEEAGPERIVISHARPRSLRVSWAPALGSAAALGYHVQFGPLRGGEAQRVEVPAGRNCTTLQGLAPGTAYLVTVTAAFRSGRESALSAKACTPDGPRPRPRPVPRAPTPGTASREP

SEQ ID NO: 1278 - protein, 652 aa, Homo Sapiens
MHPGGGPSRAERLELGLGRERPAKAIFLHRRPGEGGGRERCLRCGHVCVRRGPGPREAVPSGRPRPDTLTPPWVRQRAVTGTFCASWTPLRNRRAQRMATDMQRKRSSECLDGTLTPSDGQSMERAESPTPGMAQGMEPGAGQEGAMFVHARSYEDLTESEDGAASGDSHKEGTRGPPPLPTDMRQISQDFSELSTQLTGVARDLQEEMLPGSSEDWLEPPGAVGRPATEPPREGTTEGDEEDATEAWRLHQKHVFVLSEAGKPVYSRYGSEEALSSTMGVMVALVSFLEADKNAIRSIHADGYKVVFVRRSPLVLVAVARTRQSAQELAQELLYIYYQILSLLTGAQLSHIFQQKQNYDLRRLLSGSERITDNLLQLMARDPSFLMGAARCLPLAAAVRDTVSASLQQARARSLVFSILLARNQLVALVRRKDQFLHPIDLHLLFNLISSSSSFREGEAWTPVCLPKFNAAGFFHAHISYLEPDTDLCLLLVSTDREDFFAVSDCRRRFQERLRKRGAHLALREALRTPYYSVAQVGIPDLRHFLYKSKSSGLFTSPEIEAPYTSEEEQERLLGLYQYLHSRAHNASRPLKTIYYTGPNENLLAWVTGAFELYMCYSPLGTKASAVSAIHKLMRWIRKEEDRLFILTPLTY

SEQ ID NO: 1279 - protein, 553 aa, Homo Sapiens
MKWCWGPVLLIAGATVLMEGLQAAQRACGQRGPGPPKPQEGNTVPGEWPWQASVRRQGAHICSGSLVADTWVLTAAHCFEKAAATELNSWSVVLGSLQREGLSPGAEEVGVAALQLPRAYNHYSQGSDLALLQLAHPTTHTPLCLPQPAHRFPFGASCWATGWDQDTSDAPGTLRNLRLRLISRPTCNCIYNQLHQRHLSNPARPGMLCGGPQPGVQGPCQGDSGGPVLCLEPDGHWVQAGIISFASSCAQEDAPVLLTNTAAHSSWLQARVQGAAFLAQSPETPEMSDEDSCVACGSLRTAGPQAGAPSPWPWEARLMHQGQLACGGALVSEEAVLTAAHCFIGRQAPEEWSVGLGTRPEEWGLKQLILHGAYTHPEGGYDMALLLLAQPVTLGASLRPLCLPYPDHHLPDGERGWVLGRARPGAGISSLQTVPVTLLGPRACSRLHAAPGGDGSPILPGMVCTSAVGELPSCEGLSGAPLVHEVRGTWFLAGLHSFGDACQGPARPAVFTALPAYEDWVSSLDWQVYFAEEPEPEAEPGSCLANISQPTSC

SEQ ID NO: 1280 - protein, 638 aa, Homo Sapiens
MSDKSELKAELERKKQRLAQIREEKKRKEEERKKKETDQKKEAVAPVQEESDLEKKRREAEALLQSMGLTPESPIVFSEYWVPPPMSPSSKSVSTPSEAGSQDSGDGAVGSRTLHWDTDPSVLQLHSDSDLGRGPIKLGMAKITQVDFPPREIVTYTKETQTPVMAQPKEDEEEDDDVVAPKPPIEPEEEKTLKKDEENDSKAPPHELTEEEKQQILHSEEFLSFFDHSTRIVERALSEQINIFFDYSGRDLEDKEGEIQAGAKLSLNRQFFDERWSKHRVVSCLDWSSQYPELLVASYNNNEDAPHEPDGVALVWNMKYKKTTPEYVFHCQSAVMSATFAKFHPNLVVGGTYSGQIVLWDNRSNKRTPVQRTPLSAAAHTHPVYCVNVVGTQNAHNLISISTDGKICSWSLDMLSHPQDSMELVHKQSKAVAVTSMSFPVGDVNNFVVGSEEGSVYTACRHGSKAGISEMFEGHQGPITGIHCHAAVGAVDFSHLFVTSSFDWTVKLWTTKNNKPLYSFEDNADYVYDVMWSPTHPALFACVDGMGRLDLWNLNNDTEVPTASISVEGNPALNRVRWTHSGREIAVGDSEGQIVIYDVGEQIAVPRNDEWARFGRTLAEINANRADAEEEAATRIPA

SEQ ID NO: 1281 - protein, 837 aa, Homo Sapiens
MAEPSQAPTPAPAAQPRPLQSPAPAPTPTPAPSPASAPIPTPTPAPAPAPAAAPAGSTGTGGPGVGSGGAGSGGDPARPGLSQQQRASQRKAQVRGLPRAKKLEKLGVFSACKANETCKCNGWKNPKPPTAPRMDLQQPAANLSELCRSCEHPLADHVSHLENVSEDEINRLLGMVVDVENLFMSVHKEEDTDTKQVYFYLFKLLRKCILQMTRPVVEGSLGSPPFEKPNIEQGVLNFVQYKFSHLAPRERQTMFELSKMFLLCLNYWKLETPAQFRQRSQAEDVATYKVNYTRWLCYCHVPQSCDSLPRYETTHVFGRSLLRSIFTVTRRQLLEKFRVEKDKLVPEKRTLILTHFPKFLSMLEEEIYGANSPIWESGFTMPPSEGTQLVPRPASVSAAVVPSTPIFSPSMGGGSNSSLSLDSAGAEPMPGEKRTLPENLTLEDAKRLRVMGDIPMELVNEVMLTITDPAAMLGPETSLLSANAARDETARLEERRGIIEFHVIGNSLTPKANRRVLLWLVGLQNVFSHQLPRMPKEYIARLVFDPKHKTLALIKDGRVIGGICFRMFPTQGFTEIVFCAVTSNEQVKGYGTHLMNHLKEYHIKHNILYFLTYADEYAIGYFKKQGFSKDIKVPKSRYLGYIKDYEGATLMECELNPRIPYTELSHIIKKQKEIIKKLIERKQAQIRKVYPGLSCFKEGVRQIPVESVPGIRETGWKPLGKEKGKELKDPDQLYTTLKNLLAQIKSHPSAWPFMEPVKKSEAPDYYEVIRFPIDLKTMTERLRSRYYVTRKLFVADLQRVIANCREYNPPDSEYCRCASALEKFFYFKLKEGGLIDK

SEQ ID NO: 1282 - protein, 949 aa, Homo Sapiens
MSLAFKIFFPQTLRALSRKELCLFRKHHWRDVRQFSQWSETDLLHGHPLFLRRKPVLSFQGSHLRSRATYLVFLPGLHVGLCSGPCEMAEQRFCVDYAKRGTAGCKKCKEKIVKGVCRIGKVVPNPFSESGGDMKEWYHIKCMFEKLERARATTKKIEDLTELEGWEELEDNEKEQITQHIADLSSKAAGTPKKKAVVQAKLTTTGQVTSPVKGASFVTSTNPRKFSGFSAKPNNSGEAPSSPTPKRSLSSSKCDPRHKDCLLREFRKLCAMVADNPSYNTKTQIIQDFLRKGSAGDGFHGDVYLTVKLLLPGVIKTVYNLNDKQIVKLFSRIFNCNPDDMARDLEQGDVSETIRVFFEQSKSFPPAAKSLLTIQEVDEFLLRLSKLTKEDEQQQALQDIASRCTANDLKCIIRLIKHDLKMNSGAKHVLDALDPNAYEAFKASRNLQDVVERVLHNAQEVEKEPGQRRALSVQASLMTPVQPMLAEACKSVEYAMKKCPNGMFSEIKYDGERVQVHKNGDHFSYFSRSLKPVLPHKVAHFKDYIPQAFPGGHSMILDSEVLLIDNKTGKPLPFGTLGVHKKAAFQDANVCLFVFDCIYFNDVSLMDRPLCERRKFLHDNMVEIPNRIMFSEMKRVTKALDLADMITRVIQEGLEGLVLKDVKGTYEPGKRHWLKVKKDYLNEGAMADTADLVVLGAFYGQGSKGGMMSIFLMGCYDPGSQKWCTVTKCAGGHDDATLARLQNELDMVKISKDPSKIPSWLKVNKIYYPDFIVPDPKKAAVWEITGAEFSKSEAHTADGISIRFPRCTRIRDDKDWKSATNLPQLKELYQLSKEKADFTVVAGDEGSSTTGGSSEENKGPSGSAVSRKAPSKPSASTKKAEGKLSNSNSKDGNMQTAKPSAMKVGEKLATKSSPVKVGEKRKAADETLCQTKRRPASEQRGRTVPAGRR

SEQ ID NO: 1283 - protein, 152 aa, Homo Sapiens
MANCERTFIAIKPDGVQRGLVGEIIKRFEQKGFRLVGLKFMQASEDLLKEHYVDLKDRPFFAGLVKYMHSGPVVAMVWEGLNVVKTGRVMLGETNPADSKPGTIRGDFCIQVGRNIIHGSDSVESAEKEIGLWFHPEELVDYTSCAQNWIYE

SEQ ID NO: 1284 - protein, 172 aa, Homo Sapiens
MFYHISLEHEILLHPRYFGPNLLNTVKQKLFTEVEGTCTGKYGFVIAVTTIDNIGAGVIQPGRGFVLYPVKYKAIVFRPFKGEVVDAVVTQVNKVGLFTEIGPMSCFISRHSIPSEMEFDPNSNPPCYKTMDEDIVIQQDDEIRLKIVGTRVDKNDIFAIGSLMDDYLGLVS

SEQ ID NO: 1285 - protein, 1024 aa, Homo Sapiens
MAQGAMRFCSEGDCAISPPRCPRRWLPEGPVPQSPPASMYGSTGSLLRRVAGPGPRGRELGRVTAPCTPLRGPPSPRVAPSPWAPSSPTGQPPPGAQSSVVIFRFVEKASVRPLNGLPAPGGLSRSWDLGGVSPPRPTPALGPGSNRKLRLEASTSDPLPARGGSALPGSRNLVHGPPAPPQVGADGLYSSLPNGLGGPPERLATLFGGPADTGFLNQGDTWSSPREVSSHAQRIARAKWEFFYGSLDPPSSGAKPPEQAPPSPPGVGSRQGSGVAVGRAAKYSETDLDTVPLRCYRETDIDEVLAEREEADSAIESQPSSEGPPGTAYPPAPRPGPLPGPHPSLGSGNEDEDDDEAGGEEDVDDEVFEASEGARPGSRMPLKSPVPFLPGTSPSADGPDSFSCVFEAILESHRAKGTSYTSLASLEALASPGPTQSPFFTFELPPQPPAPRPDPPAPAPLAPLEPDSGTSSAADGPWTQRGEEEEAEARAKLAPGREPPSPCHSEDSLGLGAAPLGSEPPLSQLVSDSDSELDSTERLALGSTDTLSNGQKADLEAAQRLAKRLYRLDGFRKADVARHLGKNNDFSKLVAGEYLKFFVFTGMTLDQALRVFLKELALMGETQERERVLAHFSQRYFQCNPEALSSEDGAHTLTCALMLLNTDLHGHNIGKRMTCGDFIGNLEGLNDGGDFPRELLKALYSSIKNEKLQWAIDEEELRRSLSELADPNPKVIKRISGGSGSGSSPFLDLTPEPGAAVYKHGALVRKVHADPDCRKTPRGKRGWKSFHGILKGMILYLQKEEYKPGKALSETELKNAISIHHALATRASDYSKRPHVFYLRTADWRVFLFQAPSLEQMQSWITRINVVAAMFSAPPFPAAVSSQKKFSRPLLPSAATRLSQEEQVRTHEAKLKAMASELREHRAAQLGKKGRGKEAEEQRQKEAYLEFEKSRYSTYAALLRVKLKAGSEELDAVEAALAQAGSTEDGLPPSHSSPSLQPKPSSQPRAQRHSSEPRPGAGSGRRKP

SEQ ID NO: 1286 - protein, 331 aa, Homo Sapiens
MGTPQKDVIIKSDAPDTLLLEKHADYIASYGSKKDDYEYCMSEYLRMSGIYWGLTVMDLMGQLHRMNREEILAFIKSCQHECGGISASIGHDPHLLYTLSAVQILTLYDSINVIDVNKVVEYVKGLQKEDGSFAGDIWGEIDTRFSFCAVATLALLGKLDAINVEKAIEFVLSCMNFDGGFGCRPGSESHAGQIYCCTGFLAITSQLHQVNSDLLGWWLCERQLPSGGLNGRPEKLPDVCYSWWVLASLKIIGRLHWIDREKLRNFILACQDEETGGFADRPGDMVDPFHTLFGIAGLSLLGEEQIKPVNPVFCMPEEVLQRVNVQPELVS

SEQ ID NO: 1287 - protein, 321 aa, Homo Sapiens
MGEPQGSMRILVTGGSGLVGKAIQKVVADGAGLPGEDWVFVSSKDADLTDTAQTRALFEKVQPTHVIHLAAMVGGLFRNIKYNLDFWRKNVHMNDNVLHSAFEVGARKVVSCLSTCIFPDKTTYPIDETMIHNGPPHNSNFGYSYAKRMIDVQNRAYFQQYGCTFTAVIPTNVFGPHDNFNIEDGHVLPGLIHKVHLAKSSGSALTVWGTGNPRRQFIYSLDLAQLFIWVLREYNEVEPIILSVGEEDEVSIKEAAEAVVEAMDFHGEVTFDTTKSDGQFKKTASNSKLRTYLPDFRFTPFKQAVKETCAWFTDNYEQARK

SEQ ID NO: 1288 - protein, 147 aa, Homo Sapiens
MASHRLLLLCLAGLVFVSEAGPTGTGESKCPLMVKVLDAVRGSPAINVAVHVFRKAADDTWEPFASGKTSESGELHGLTTEEEFVEGIYKVEIDTKSYWKALGISPFHEHAEVVFTANDSGPRRYTIAALLSPYSYSTTAVVTNPKE

SEQ ID NO: 1289 - protein, 284 aa, Homo Sapiens
MAPRLCSISVTARRLLGGPGPRAGDVASAAAARFYSKDNEGSWFRSLFVHKVDPRKDAHSTLLSKKETSNLYKIQFHNVKPEYLDAYNSLTEAVLPKLHLDEDYPCSLVGNWNTWYGEQDQAVHLWRFSGGYPALMDCMNKLKNNKEYLEFRRERSQMLLSRRNQLLLEFSFWNEPQPRMGPNIYELRTYKLKPGTMIEWGNNWARAIKYRQENQEAVGGFFSQIGELYVVHHLWAYKDLQSREETRNAAWRKRGWDENVYYTVPLVRHMESRIMIPLKISPLQ

SEQ ID NO: 1290 - protein, 959 aa, Homo Sapiens
MAASTGYVRLWGAARCWVLRRPMLAAAGGRVPTAAGAWLLRGQRTCDASPPWALWGRGPAIGGQWRGFWEASSRGGGAFSGGEDASEGGAEEGAGGAGGSAGAGEGPVITALTPMTIPDVFPHLPLIAITRNPVFPRFIKIIEVKNKKLVELLRRKVRLAQPYVGVFLKRDDSNESDVVESLDEIYHTGTFAQIHEMQDLGDKLRMIVMGHRRVHISRQLEVEPEEPEAENKHKPRRKSKRGKKEAEDELSARHPAELAMEPTPELPAEVLMVEVENVVHEDFQVTEEVKALTAEIVKTIRDIIALNPLYRESVLQMMQAGQRVVDNPIYLSDMGAALTGAESHELQDVLEETNIPKRLYKALSLLKKEFELSKLQQRLGREVEEKIKQTHRKYLLQEQLKIIKKELGLEKDDKDAIEEKFRERLKELVVPKHVMDVVDEELSKLGLLDNHSSEFNVTRNYLDWLTSIPWGKYSNENLDLARAQAVLEEDHYGMEDVKKRILEFIAVSQLRGSTQGKILCFYGPPGVGKTSIARSIARALNREYFRFSVGGMTDVAEIKGHRRTYVGAMPGKIIQCLKKTKTENPLILIDEVDKIGRGYQGDPSSALLELLDPEQNANFLDHYLDVPVDLSKVLFICTANVTDTIPEPLRDRMEMINVSGYVAQEKLAIAERYLVPQARALCGLDESKAKLSSDVLTLLIKQYCRESGVRNLQKQVEKVLRKSAYKIVSGEAESVEVTPENLQDFVGKPVFTVERMYDVTPPGVVMGLAWTAMGGSTLFVETSLRRPQDKDAKGDKDGSLEVTGQLGEVMKESARIAYTFARAFLMQHAPANDYLVTSHIHLHVPEGATPKDGPSAGCTIVTALLSLAMGRPVRQNLAMTGEVSLTGKILPVGGIKEKTIAAKRAGVTCIVLPAENKKDFYDLAAFITEGLEVHFVEHYREIFDIAFPDEQAEALAVER

SEQ ID NO: 1291 - protein, 241 aa, Homo Sapiens
MVDYYEVLGVQRHASPEDIKKAYRKLALKWHPDKNPENKEEAERKFKQVAEAYEVLSDAKKRDIYDKYGKEGLNGGGGGGSHFDSPFEFGFTFRNPDDVFREFFGGRDPFSFDFFEDPFEDFFGNRRGPRGSRSRGTGSFFSAFSGFPSFGSGFSSFDTGFTSFGSLGHGGLTSFSSTSFGGSGMGNFKSISTSTKMVNGRKITTKRIVENGQERVEVEEDGQLKSLTINGKEQLLRLDNK

SEQ ID NO: 1292 - protein, 737 aa, Homo Sapiens
MADTQYILPNDIGVSSLDCREAFRLLSPTERLYAYHLSRAAWYGGLAVLLQTSPEAPYIYALLSRLFRAQDPDQLRQHALAEGLTEEEYQAFLVYAAGVYSNMGNYKSFGDTKFVPNLPKEKLERVILGSEAAQQHPEEVRGLWQTCGELMFSLEPRLRHLGLGKEGITTYFSGNCTMEDAKLAQDFLDSQNLSAYNTRLFKEVDGEGKPYYEVRLASVLGSEPSLDSEVTSKLKSYEFRGSPFQVTRGDYAPILQKVVEQLEKAKAYAANSHQGQMLAQYIESFTQGSIEAHKRGSRFWIQDKGPIVESYIGFIESYRDPFGSRGEFEGFVAVVNKAMSAKFERLVASAEQLLKELPWPPTFEKDKFLTPDFTSLDVLTFAGSGIPAGINIPNYDDLRQTEGFKNVSLGNVLAVAYATQREKLTFLEEDDKDLYILWKGPSFDVQVGLHELLGHGSGKLFVQDEKGAFNFDQETVINPETGEQIQSWYRSGETWDSKFSTIASSYEECRAESVGLYLCLHPQVLEIFGFEGADAEDVIYVNWLNMVRAGLLALEFYTPEAFNWRQAHMQARFVILRVLLEAGEGLVTITPTTGSDGRPDARVRLDRSKIRSVGKPALERFLRRLQVLKSTGDVAGGRALYEGYATVTDAPPECFLTLRDTVLLRKESRKLIVQPNTRLEGSDVQLLEYEASAAGLIRSFSERFPEDGPELEEILTQLATADARFWKGPSEAPSGQA

SEQ ID NO: 1293 - protein, 134 aa, Homo Sapiens
MEFVMKQALGGATKDMGKMLGGDEEKDPDAAKKEEERQEALRQAEEERKAKYAKMEAEREAVRQGIRDKYGIKKKEEREAEAQAAMEANSEGSLTRPKKAIPPGCGDEVEEEDESILDTVIKYLPGPLQDMLKK

SEQ ID NO: 1294 - protein, 270 aa, Homo Sapiens
MGEAEAPSFEMTWSSTTSSGYCSQEDSDSELEQYFTARTSLARRPRRDQDEPVEWETPDLSQAEIEQKIKEYNAQINSNLFMSLNKDGSYTGFIKVQLKLVRPVSVPSSKKPPSLQDARRGPGRGTSVRRRTSFYLPKDAVKHLHVLSRTRAREVIEALLRKFLVVDDPRKFALFERAERHGQVYLRKLLDDEQPLRLRLLAGPSDKALSFVLKENDSGEVNWDAFSMPELHNFLRILQREEEEHLRQILQKYSYCRQKIQEALHACPLG

SEQ ID NO: 1295 - protein, 504 aa, Homo Sapiens
MGAGGPRRGEGPPDGGWGWVVLGACFVVTGFAYGFPKAVSVFFRALMRDFDAGYSDTAWVSSIMLAMLYGTGPVSSILVTRFGCRPVMLAGGLLASAGMILASFATRLLELYLTAGVLTGLGLALNFQPSLIMLGLYFERRRPLANGLAAAGSPVFLSALSPLGQQLLERFGWRGGFLLLGGLLLHCCACGAVMRPPPGPGPRPRRDSAGDRAGDAPGEAEADGAGLQLREASPRVRPRRRLLDLAVCTDRAFAVYAVTKFLMALGLFVPAILLVNYAKDAGVPDTDAAFLLSIVGFVDIVARPACGALAGLARLRPHVPYLFSLALLANGLTDLSSARARSYGALVAFCVAFGLSYGMVGALQFEVLMAAVGAPRFPSALGLVLLVEAAAVLIGPPSAGRLVDVLKNYEIIFYLAGSEVALAGVFMAVATNCCLRCAKAAPSGPGTEGGASDTEDAEAEGDSEPLPVVAEEPGNLEALEVLSARGEPTEPEIEARPRLAAESV

SEQ ID NO: 1296 - protein, 261 aa, Homo Sapiens
MALNKNHSEGGGVIVNNTESILMSYDHVELTFNDMKNVPEAFKGTKKGTVYLTPYRVIFLSKGKDAMQSFMMPFYLMKDCEIKQPVFGANYIKGTVKAEAGGGWEGSASYKLTFTAGGAIEFGQRMLQVASQASRGEVPSGAYGYSYMPSGAYVYPPPVANGMYPCPPGYPYPPPPPEFYPGPPMMDGAMGYVQPPPPPYPGPMEPPVSGPDVPSTPAAEAKAAEAAASAYYNPGNPHNVYMPTSQPPPPPYYPPEDKKTQ

SEQ ID NO: 1297 - protein, 547 aa, Homo Sapiens
MEDSEALGFEHMGLDPRLLQAVTDLGWSRPTLIQEKAIPLALEGKDLLARARTGSGKTAAYAIPMLQLLLHRKATGPVVEQAVRGLVLVPTKELARQAQSMIQQLATYCARDVRVANVSAAEDSVSQRAVLMEKPDVVVGTPSRILSHLQQDSLKLRDSLELLVVDEADLLFSFGFEEELKSLLCHLPRIYQAFLMSATFNEDVQALKELILHNPVTLKLQESQLPGPDQLQQFQVVCETEEDKFLLLYALLKLSLIRGKSLLFVNTLERSYRLRLFLEQFSIPTCVLNGELPLRSRCHIISQFNQGFYDCVIATDAEVLGAPVKGKRRGRGPKGDKASDPEAGVARGIDFHHVSAVLNFDLPPTPEAYIHRAGRTARANNPGIVLTFVLPTEQFHLGKIEELLSGENRGPILLPYQFRMEEIEGFRYRCRDAMRSVTKQAIREARLKEIKEELLHSEKLKTYFEDNPRDLQLLRHDLPLHPAVVKPHLGHVPDYLVPPALRGLVRPHKKRKKLSSSCRKAKRAKSQNPLRSFKHKGKKFRPTAKPS

SEQ ID NO: 1298 - protein, 594 aa, Homo Sapiens
MAAAVLRDSTSVPVTAEAKLMGFTQGCVTFEDVAIYFSQEEWGLLDEAQRLLYRDVMLENFALITALVCWHGMEDEETPEQSVSVEGVPQVRTPEASPSTQKIQSCDMCVPFLTDILHLTDLPGQELYLTGACAVFHQDQKHHSAEKPLESDMDKASFVQCCLFHESGMPFTSSEVGKDFLAPLGILQPQAIANYEKPNKISKCEEAFHVGISHYKWSQCRRESSHKHTFFHPRVCTGKRLYESSKCGKACCCECSLVQLQRVHPGERPYECSECGKSFSQTSHLNDHRRIHTGERPYVCGQCGKSFSQRATLIKHHRVHTGERPYECGECGKSFSQSSNLIEHCRIHTGERPYECDECGKAFGSKSTLVRHQRTHTGEKPYECGECGKLFRQSFSLVVHQRIHTTARPYECGQCGKSFSLKCGLIQHQLIHSGARPFECDECGKSFSQRTTLNKHHKVHTAERPYVCGECGKAFMFKSKLVRHQRTHTGERPFECSECGKFFRQSYTLVEHQKIHTGLRPYDCGQCGKSFIQKSSLIQHQVVHTGERPYECGKCGKSFTQHSGLILHRKSHTVERPRDSSKCGKPYSPRSNIV

SEQ ID NO: 1299 - protein, 634 aa, Homo Sapiens
MAEEQEFTQLCKLPAQPSHPHCVNNTYRSAQHSQALLRGLLALRDSGILFDVVLVVEGRHIEAHRILLAASCDYFRGMFAGGLKEMEQEEVLIHGVSYNAMCQILHFIYTSELELSLSNVQETLVAACQLQIPEIIHFCCDFLMSWVDEENILDVYRLAELFDLSRLTEQLDTYILKNFVAFSRTDKYRQLPLEKVYSLLSSNRLEVSCETEVYEGALLYHYSLEQVQADQISLHEPPKLLETVRFPLMEAEVLQRLHDKLDPSPLRDTVASALMYHRNESLQPSLQSPQTELRSDFQCVVGFGGIHSTPSTVLSDQAKYLNPLLGEWKHFTASLAPRMSNQGIAVLNNFVYLIGGDNNVQGFRAESRCWRYDPRHNRWFQIQSLQQEHADLSVCVVGRYIYAVAGRDYHNDLNAVERYDPATNSWAYVAPLKREVYAHAGATLEGKMYITCGRRGEDYLKETHCYDPGSNTWHTLADGPVRRAWHGMATLLNKLYVIGGSNNDAGYRRDVHQVACYSCTSGQWSSVCPLPAGHGEPGIAVLDNRIYVLGGRSHNRGSRTGYVHIYDVEKDCWEEGPQLDNSISGLAACVLTLPRSLLLEPPRGTPDRSQADPDFASEVMSVSDWEEFDNSSED

SEQ ID NO: 1300 - protein, 141 aa, Homo Sapiens
MWVLGIAATFCGLFLLPGFALQIQCYQCEEFQLNNDCSSPEFIVNCTVNVQDMCQKEVMEQSAGIMYRKSCASSAACLIASAGYQSFCSPGKLNSVCISCCNTPLCNGPRPKKRGSSASALRPGLRTTILFLKLALFSAHC

SEQ ID NO: 1301 - protein, 289 aa, Homo Sapiens
MAGAGRGAAVSRVQAGPGSPRRARGRQQVQPLGKQRPAPWPGLRSKEKKKVNCKPKNQDEQEIPFRLREIMRSRQEMKNPISNKKRKKAAQVTFRKTLEKEAKGEEPDIAVPKFKQRKGESDGAYIHRMQQEAQHVLFLSKNQAIRQPEVQAAPKEKSEQKKAKKAFQKRRLDKVRRKKEEKAADRLEQELLRDTVKFGEVVLQPPELTARPQRSVSKDQPGRRSQMLRMLLSPGGVSQPLTASLARQRIVEEERERAVQAYRALKQRQQQLHGERPHLTSRKKPEPQL

SEQ ID NO: 1302 - protein, 770 aa, Homo Sapiens
MGDEKDSWKVKTLDEILQEKKRRKEQEEKAEIKRLKNSDDRDSKRDSLEEGELRDHCMEITIRNSPYRREDSMEDRGEEDDSLAIKPPQQMSRKEKVHHRKDEKRKEKWKHARVKEREHERRKRHREEQDKARREWERQKRREMAREHSRRERDRLEQLERKRERERKMREQQKEQREQKERERRAEERRKEREARREVSAHHRTMREDYSDKVKASHWSRSPPRPPRERFELGDGRKPVKEEKMEERDLLSDLQDISDSERKTSSAESSSAESGSGSEEEEEEEEEEEEEGSTSEESEEEEEEEEEEEEETGSNSEEASEQSAEEVSEEEMSEDEERENENHLLVVPESRFDRDSGESEEAEEEVGEGTPQSSALTEGDYVPDSPALLPIELKQELPKYLPALQGCRSVEEFQCLNRIEEGTYGVVYRAKDKKTDEIVALKRLKMEKEKEGFPITSLREINTILKAQHPNIVTVREIVVGSNMDKIYIVMNYVEHDLKSLMETMKQPFLPGEVKTLMIQLLRGVKHLHDNWILHRDLKTSNLLLSHAGILKVGDFGLAREYGSPLKAYTPVVVTQWYRAPELLLGAKEYSTAVDMWSVGCIFGELLTQKPLFPGNSEIDQINKVFKELGTPSEKIWPGYSELPVVKKMTFSEHPYNNLRKRFGALLSDQGFDLMNKFLTYFPGRRISAEDGLKHEYFRETPLPIDPSMFPTWPAKSEQQRVKRGTSPRPPEGGLGYSQLGDDDLKETGFHLTTTNQGASAAGPGFSLKF

SEQ ID NO: 1303 - protein, 269 aa, Homo Sapiens
MAAALFVLLGFALLGTHGASGAAGTVFTTVEDLGSKILLTCSLNDSATEVTGHRWLKGGVVLKEDALPGQKTEFKVDSDDQWGEYSCVFLPEPMGTANIQLHGPPRVKAVKSSEHINEGETAMLVCKSESVPPVTDWAWYKITDSEDKALMNGSESRFFVSSSQGRSELHIENLNMEADPGQYRCNGTSSKGSDQAIITLRVRSHLAALWPFLGIVAEVLVLVTIIFIYEKRRKPEDVLDDDDAGSAPLKSSGQHQNDKGKNVRQRNSS

SEQ ID NO: 1304 - protein, 598 aa, Homo Sapiens
MVQKTSMSRGPYPPSQEIPMEVFDPSPQGKYSKRKGRFKRSDGSTSSDTTSNSFVRQGSAESYTSRPSDSDVSLEEDREALRKEAERQALAQLEKAKTKPVAFAVRTNVGYNPSPGDEVPVQGVAITFEPKDFLHIKEKYNNDWWIGRLVKEGCEVGFIPSPVKLDSLRLLQEQKLRQNRLGSSKSGDNSSSSLGDVVTGTRRPTPPASAKQKQKSTEHVPPYDVVPSMRPIILVGPSLKGYEVTDMMQKALFDFLKHRFDGRISITRVTADISLAKRSVLNNPSKHIIIERSNTRSSLAEVQSEIERIFELARTLQLVALDADTINHPAQLSKTSLAPIIVYIKITSPKVLQRLIKSRGKSQSKHLNVQIAASEKLAQCPPEMFDIILDENQLEDACEHLAEYLEAYWKATHPPSSTPPNPLLNRTMATAALAASPAPVSNLQGPYLASGDQPLERATGEHASMHEYPGELGQPPGLYPSSHPPGRAGTLRALSRQDTFDADTPGSRNSAYTELGDSCVDMETDPSEGPGLGDPAGGGTPPARQGSWEDEEEDYEEELTDNRNRGRNKARYCAEGGGPVLGRNKNELEGWGRGVYIR

SEQ ID NO: 1305 - protein, 416 aa, Homo Sapiens
MELRVGNKYRLGRKIGSGSFGDIYLGANIASGEEVAIKLECVKTKHPQLHIESKFYKMMQGGVGIPSIKWCGAEGDYNVMVMELLGPSLEDLFNFCSRKFSLKTVLLLADQMISRIEYIHSKNFIHRDVKPDNFLMGLGKKGNLVYIIDFGLAKKYRDARTHQHIPYRENKNLTGTARYASINTHLGIEQSRRDDLESLGYVLMYFNLGSLPWQGLKAATKRQKYERISEKKMSTPIEVLCKGYPSEFSTYLNFCRSLRFDDKPDYSYLRQLFRNLFHRQGFSYDYVFDWNMLKFGAARNPEDVDRERREHEREERMGQLRGSATRALPPGPPTGATANRLRSAAEPVASTPASRIQPAGNTSPRAISRVDRERKVSMRLHRGAPANVSSSDLTGRQEVSRIPASQTSVPFDHLGK

SEQ ID NO: 1306 - protein, 228 aa, Homo Sapiens
MVKSSLQRILNSHCFAREKEGDKPSATIHASRTMPLLSLHSRGGSSSESSRVSLHCCSNPGPGPRWCSDAPHPPLKIPGGRGNSQRDHNLSANLFYSDDRLNVTEELTSNDKTRILNVQSRLTDAKRINWRTVLSGGSLYIEIPGGALPEGSKDSFAVLLEFAEEQLRADHVFICFHKNREDRAALLRTFSFLGFEIVRPGHPLVPKRPDACFMAYTFERESSGEEEE

SEQ ID NO: 1307 - protein, 648 aa, Homo Sapiens [sequence omitted]

SEQ ID NO: 1308 - protein, 194 aa, Homo Sapiens [sequence omitted]

SEQ ID NO: 1309 - protein, 165 aa, Homo Sapiens
MLMPKKNRIAIYELLFKEGVMVAKKDVHMPKHPELADKNVPNLHVMKAMQSLKSRGYVKEQFAWRHFYWYLTNEGIQYLRDYLHLPPEIVPATLRRSRPETGRPRPKGLEGERPARLTRGEADRDTYRRSAVPPGADKKAEAGAGSATEFQFRGGFGRGRGQPPQ

SEQ ID NO: 1310 - protein, 367 aa, Homo Sapiens
MSSPPPARSGFYRQEVTKTAWEVRAVYRDLQPVGSGAYGAVCSAVDGRTGAKVAIKKLYRPFQSELFAKRAYRELRLLKHMRHENVIGLLDVFTPDETLDDFTDFYLVMPFMGTDLGKLMKHEKLGEDRIQFLVYQMLKGLRYIHAAGIIHRDLKPGNLAVNEDCELKILDFGLARQADSEMTGYVVTRWYRAPEVILNWMRYTQTVDIWSVGCIMAEMITGKTLFKGSDHLDQLKEIMKVTGTPPAEFVQRLQSDEAKNYMKGLPELEKKDFASILTNASPLAVNLLEKMLVLDAEQRVTAGEALAHPYFESLHDTEDEPQVQKYDDSFDDVDRTLDEWKRVTYKEVLSFKPPRQLGARVSKETPL

SEQ ID NO: 1311 - protein, 767 aa, Homo Sapiens
MSFDPNLLHNNGHNGYPNGTSAALRETGVIEKLLTSYGFIQCSERQARLFFHCSQYNGNLQDLKVGDDVEFEVSSDRRTGKPIAVKLVKIKQEILPEERMNGQEVFYLTYTPEDVEGNVQLETGDKINFVIDNNKHTGAVSARNIMLLKKKQARCQGVVCAMKEAFGFIERGDVVKEIFFHYSEFKGDLETLQPGDDVEFTIKDRNGKEVATDVRLLPQGTVIFEDISIEHFEGTVTKVIPKVPSKNQNDPLPGRIKVDFVIPKELPFGDKDTKSKVTLLEGDHVRFNISTDRRDKLERATNIEVLSNTFQFTNEAREMGVIAAMRDGFGFIKCVDRDVRMFFHFSEILDGNQLHIADEVEFTVVPDMLSAQRNHAIRIKKLPKGTVSFHSHSDHRFLGTVEKEATFSNPKTTSPNKGKEKEAEDGIIAYDDCGVKLTIAFQAKDVEGSTSPQIGDKVEFSISDKQRPGQQVATCVRLLGRNSNSKRLLGYVATLKDNFGFIETANHDKEIFFHYSEFSGDVDSLELGDMVEYSLSKGKGNKVSAEKVNKTHSVNGITEEADPTIYSGKVIRPLRSVDPTQTEYQGMIEIVEEGDMKGEVYPFGIVGMANKGDCLQKGESVKFQLCVLGQNAQTMAYNITPLRRATVECVKDQFGFINYEVGDSKKLFFHVKEVQDGIELQAGDEVEFSVILNQRTGKCSACNVWRVCEGPKAVAAPRPDRLVNRLKNITLDDASAPRLMVLRQPRGPDNSMGFGAERKIRQAGVID

SEQ ID NO: 1312 - protein, 1126 aa, Homo Sapiens
MEPNDSTSTAVEEPDSLEVLVKTLDSQTRTFIVGAQMNVKEFKEHIAASVSIPSEKQRLIYQGRVLQDDKKLQEYNVGGKVIHLVERAPPQTHLPSGASSGTGSASATHGGGSPPGTRGPGASVHDRNANSYVMVGTFNLPSDGSAVDVHINMEQAPIQSEPRVRLVMAQHMIRDIQTLLSRMECRGGPQPQHSQPPPQPPAVTPEPVALSSQTSEPVESEAPPREPMEAEEVEERAPAQNPELTPGPAPAGPTPAPETNAPNHPSPAEYVEVLQELQRLESRLQPFLQRYYEVLGAAATTDYNNNHEGREEDQRLINLVGESLRLLGNTFVALSDLRCNLACTPPRHLHVVRPMSHYTTPMVLQQAAIPIQINVGTTVTMTGNGTRPPPTPNAEAPPPGPGQASSVAPSSTNVESSAEGAPPPGPAPPPATSHPRVIRISHQSVEPVVMMHMNIQDSGTQPGGVPSAPTGPLGPPGHGQTLGQQVPGFPTAPTRVVIARPTPPQARPSHPGGPPVSGTLQGAGLGTNASLAQMVSGLVGQLLMQPVLVAQGTPGMAPPPAPATASASAGTTNTATTAGPAPGGPAQPPPTPQPSMADLQFSQLLGNLLGPAGPGAGGSGVASPTITVAMPGVPAFLQGMTDFLQATQTAPPPPPPPPPPPPAPEQQTMPPPGSPSGGAGSPGGLGLESLSPEFFTSVVQGVLSSLLGSLGARAGSSESIAAFIQRLSGSSNIFEPGADGALGFFGALLSLLCQNFSMVDVVMLLHGHFQPLQRLQPQLRSFFHQHYLGGQEPTPSNIRMATHTLITGLEEYVRESFSLVQVQPGVDIIRTNLEFLQEQFNSIAAHVLHCTDSGFGARLLELCNQGLFECLALNLHCLGGQQMELAAVINGRIRRMSRGVNPSLVSWLTTMMGLRLQVVLEHMPVGPDAILRYVRRVGDPPQPLPEEPMEVQGAERASPEPQRENASPAPGTTAEEAMSRGPPPAPEGGSRDEQDGASAETEPWAAAVPPEWVPIIQQDIQSQRKVKPQPPLSDAYLSGMPAKRRKTMQGEGPQLLLSEAVSRAAKAAGARPLTSPESLSRDLEAPEVQESYRQQLRSDIQKRLQEDPNYSPQRFPNAQRAFADDP

SEQ ID NO: 1313 - protein, 963 aa, Homo Sapiens
MAVAPRLFGGLCFRFRDQNPEVAVEGRLPISHSCVGCRRERTAMATVAANPAAAAAAVAAAAAVTEDREPQHEELPGLDSQWRQIENGESGRERPLRAGESWFLVEKHWYKQWEAYVQGGDQDSSTFPGCINNATLFQDEINWRLKEGLVEGEDYVLLPAAAWHYLVSWYGLEHGQPPIERKVIELPNIQKVEVYPVELLLVRHNDLGKSHTVQFSHTDSIGLVLRTARERFLVEPQEDTRLWAKNSEGSLDRLYDTHITVLDAALETGQLIIMETRKKDGTWPSAQLHVMNNNMSEEDEDFKGQPGICGLTNLGNTCFMNSALQCLSNVPQLTEYFLNNCYLEELNFRNPLGMKGEIAEAYADLVKQAWSGHHRSIVPHVFKNKVGHFASQFLGYQQHDSQELLSFLLDGLHEDLNRVKKKEYVELCDAAGRPDQEVAQEAWQNHKRRNDSVIVDTFHGLFKSTLVCPDCGNVSVTFDPFCYLSVPLPISHKRVLEVFFIPMDPRRKPEQHRLVVPKKGKISDLCVALSKHTGISPERMMVADVFSHRFYKLYQLEEPLSSILDRDDIFVYEVSGRIEAIEGSREDIVVPVYLRERTPARDYNNSYYGLMLFGHPLLVSVPRDRFTWEGLYNVLMYRLSRYVTKPNSDDEDDGDEKEDDEEDKDDVPGPSTGGSLRDPEPEQAGPSSGVTNRCPFLLDNCLGTSQWPPRRRRKQLFTLQTVNSNGTSDRTTSPEEVHAQPYIAIDWEPEMKKRYYDEVEAEGYVKHDCVGYVMKKAPVRLQECIELFTTVETLEKENPWYCPSCKQHQLATKKLDLWMLPEILIIHLKRFSYTKFSREKLDTLVEFPIRDLDFSEFVIQPQNESNPELYKYDLIAVSNHYGGMRDGHYTTFACNKDSGQWHYFDDNSVSPVNENQIESKAAYVLFYQRQDVARRLLSPAGSSGAPASPACSSPPSSEFMDVN

SEQ ID NO: 1314 - protein, 528 aa, Homo Sapiens
MGDAPSPEEKLHLITRNLQEVLGEEKLKEILKERELKIYWGTATTGKPHVAYFVPMSKIADFLKAGCEVTILFADLHAYLDNMKAPWELLELRVSYYENVIKAMLESIGVPLEKLKFIKGTDYQLSKEYTLDVYRLSSVVTQHDSKKAGAEVVKQVEHPLLSGLLYPGLQALDEEYLKVDAQFGGIDQRKIFTFAEKYLPALGYSKRVHLMNPMVPGLTGSKMSSSEEESKIDLLDRKEDVKKKLKKAFCEPGNVENNGVLSFIKHVLFPLKSEFVILRDEKWGGNKTYTAYVDLEKDFAAEVVHPGDLKNSVEVALNKLLDPIREKFNTPALKKLASAAYPDPSKQKPMAKGPAKNSEPEEVIPSRLDIRVGKIITVEKHPDADSLYVEKIDVGEAEPRTVVSGLVQFVPKEELQDRLVVVLCNLKPQKMRGVESQGMLLCASIEGINRQVEPLDPPAGSAPGEHVFVKGYEKGQPDEELKPKKKVFEKLQADFKISEECIAQWKQTNFMTKLGSISCKSLKGGNIS

SEQ ID NO: 1315 - protein, 399 aa, Homo Sapiens
MEDGVYEPPDLTPEERMELENIRRRKQELLVEIQRLREELSEAMSEVEGLEANEGSKTLQRNRKMAMGRKKFNMDPKKGIQFLVENELLQNTPEEIARFLYKGEGLNKTAIGDYLGEREELNLAVLHAFVDLHEFTDLNLVQALRQFLWSFRLPGEAQKIDRMMEAFAQRYCLCNPGVFQSTDTCYVLSFAVIMLNTSLHNPNVRDKPGLERFVAMNRGINEGGDLPEELLRNLYDSIRNEPFKIPEDDGNDLTHTFFNPDREGWLLKLGGRVKTWKRRWFILTDNCLYYFEYTTDKEPRGIIPLENLSIREVDDPRKPNCFELYIPNNKGQLIKACKTEADGRVVEGNHMVYRISAPTQEEKDEWIKSIQAAVSVDPFYEMLAARKKRISVKKKQEQP

SEQ ID NO: 1316 - protein, 299 aa, Homo Sapiens
MEEFDSEDFSTSEEDEDYVPSGGEYSEDDVNELVKEDEVDGEEQTQKTQGKKRKAQSIPARKRRQGGLSLEEEEEEDANSESEGSSSEEEDDAAEQEKGIGSEDARKKKEDELWASFLNDVGPKSKVPPSTQVKKGEETEETSSSKLLVKAEELEKPKETEKVKITKVFDFAGEEVRVTKEVDATSKEAKSFFKQNEKEKPQANVPSALPSLPAGSGLKRSSGMSSLLGKIGAKKQKMSTLEKSKLDWESFKEEEGIGEELAIHNRGKEGYIERKAFLDRVDHRQFEIERDLRLSKMKP

SEQ ID NO: 1317 - protein, 334 aa, Homo Sapiens
MATEEKKPETEAARAQPTPSSSATQSKPTPVKPNYALKFTLAGHTKAVSSVKFSPNGEWLASSSADKLIKIWGAYDGKFEKTISGHKLGISDVAWSSDSNLLVSASDDKTLKIWDVSSGKCLKTLKGHSNYVFCCNFNPQSNLIVSGSFDESVRIWDVKTGKCLKTLPAHSDPVSAVHFNRDGSLIVSSSYDGLCRIWDTASGQCLKTLIDDDNPPVSFVKFSPNGKYILAATLDNTLKLWDYSKGKCLKTYTGHKNEKYCIFANFSVTGGKWIVSGSEDNLVYIWNLQTKEIVQKLQGHTDVVISTACHPTENIIASAALENDKTIKLWKSDC

SEQ ID NO: 1318 - protein, 299 aa, Homo Sapiens
MAQNLKDLAGRLPAGPRGMGTALKLLLGAGAVAYGVRESVFTVEGGHRAIFFNRIGGVQQDTILAEGLHFRIPWFQYPIIYDIRARPRKISSPTGSKDLQMVNISLRVLSRPNAQELPSMYQRLGLDYEERVLPSIVNEVLKSVVAKFNASQLITQRAQVSLLIRRELTERAKDFSLILDDVAITELSFSREYTAAVEAKQVAQQEAQRAQFLVEKAKQEQRQKIVQAEGEAEAAKMLGEALSKNPGYIKLRKIRAAQNISKTIATSQNRIYLTADNLVLNLQDESFTRGSDSLIKGKK

SEQ ID NO: 1319 - protein, 117 aa, Homo Sapiens
MKWMFKEDHSLEHRCVESAKIRAKYPDRVPVIVEKVSGSQIVDIDKRKYLVPSDITVAQFMWIIRKRIQLPSEKAIFLFVDKTVPQSSLTMGQLYEKEKDEDGFLYVAYSGENTFGF

SEQ ID NO: 1320 - protein, 575 aa, Homo Sapiens
MDPRGILKAFPKRQKIHADASSKVLAKIPRREEGEEAEEWLSSLRAHVVRTGIGRARAELFEKQIVQHGGQLCPAQGPGVTHIVVDEGMDYERALRLLRLPQLPPGAQLVKSAWLSLCLQERRLVDVAGFSIFIPSRYLDHPQPSKAEQDASIPPGTHEALLQTALSPPPPPTRPVSPPQKAKEAPNTQAQPISDDEASDGEETQVSAADLEALISGHYPTSLEGDCEPSPAPAVLDKWVCAQPSSQKATNHNLHITEKLEVLAKAYSVQGDKWRALGYAKAINALKSFHKPVTSYQEACSIPGIGKRMAEKIIEILESGHLRKLDHISESVPVLELFSNIWGAGTKTAQMWYQQGFRSLEDIRSQASLTTQQAIGLKHYSDFLERMPREEATEIEQTVQKAAQAFNSGLLCVACGSYRRGKATCGDVDVLITHPDGRSHRGIFSRLLDSLRQEGFLTDDLVSQEENGQQQKYLGVCRLPGPGRRHRRLDIIVVPYSEFACALLYFTGSAHFNRSMRALAKTKGMSLSEHALSTAVVRNTHGCKVGPGRVLPTPTEKDVFRLLGLPYREPAERDW

SEQ ID NO: 1321 - protein, 431 aa, Homo Sapiens
MAANLSRNGPALQEAYVRVVTEKSPTDWALFTYEGNSNDIRVAGTGEGGLEEMVEELNSGKVMYAFCRVKDPNSGLPKFVLINWTGEGVNDVRKGACASHVSTMASFLKGAHVTINARAEEDVEPECIMEKVAKASGANYSFHKESGRFQDVGPQAPVGSVYQKTNAVSEIKRVGKDSFWAKAEKEEENRRLEEKRRAEEAQRQLEQERRERELREAARREQRYQEQGGEASPQSRTWEQQQEVVSRNRNEQESAVHPREIFKQKERAMSTTSISSPQPGKLRSPFLQKQLTQPETHFGREPAAAISRPRADLPAEEPAPSTPPCLVQAEEEAVYEEPPEQETFYEQPPLVQQQGAGSEHIDHHIQGQGLSGQGLCARALYDYQAADDTEISFDPENLITGIEVIDEGWWRGYGPDGHFGMFPANYVELIE

SEQ ID NO: 1322 - protein, 695 aa, Homo Sapiens
MDCYTANWNPLGDSAFYRKYELYSMDWDLKEELRDCLVAAAPYGGPIALLRNPWRKEKAASVRPVLDIYSASGMPLASLLWKSGPVVSLGWSAEEELLCVQEDGAVLVYGLHGDFRRHFSMGNEVLQNRVLDARIFHTEFGSGVAILTGAHRFTLSANVGDLKLRRMPEVPGLQSAPSCWTVLCQDRVAHILLAVGPDLYLLDHAACSAVTPPGLAPGVSSFLQMAVSFTYRHLALFTDTGYIWMGTASLKEKLCEFNCNIRAPPKQMVWCSRPRSKERAVVVAWERRLMVVGDAPESIQYKQLTIQVLLDRLVLRRLYPLAIQICEYLRLPEVQGVSRILAHWACYKVQQKDVSDEDVARAINQKLGDTPGVSYSDIAARAYGCGRTELAIKLLEYEPRSGEQVPLLLKMKRSKLALSKAIESGDTDLVFTVLLHLKNELNRGDFFMTLRNQPMALSLYRQFCKHQELETLKDLYNQDDNHQELGSFHIRASYAAEERIEGRVAALQTAADAFYKAKNEFAAKATEDQMRLLRLQRRLEDELGGQFLDLSLHDTVTTLILGGHNKRAEQLARDFRIPDKRLWWLKLTALADLEDWEELEKFSKSKKSPIGYLPFVEICMKQHNKYEAKKYASRVGPEQKVKALLLVGDVAQAADVAIEHRNEAELSLVLSHCTGATDGATADKIQRARAQAQKK

SEQ ID NO: 1323 - protein, 248 aa, Homo Sapiens
MRLIQNMCTIAEYPAPGNAAASDCCVGAAGRRLVKIAVVGASGVGKTALVVRFLTKRFIGDYERNAGNLYTRQVQIEGETLALQVQDTPGIQVHENSLSCSEQLNRCIRWADAVVIVFSITDYKSYELISQLHQHVQQLHLGTRLPVVVVANKADLLHIKQVDPQLGLQLASMLGCSFYEVSVSENYNDVYSAFHVLCKEVSHKQQPSSTPEKRRTSLIPRPKSPNMQDLKRRFKQALSAKVRTVTSV

SEQ ID NO: 1324 - protein, 300 aa, Homo Sapiens
MEPPMEPSGGEQEPGAVRFLDLPWEDVLLPHVLNRVPLRQLLRLQRVSRAFRSLVQLHLAGLRRFDAAQVGPQIPRAALARLLRDAEGLQELALAPCHEWLSDEDLVPVLARNPQLRSVALGGCGQLSRRALGALAEGCPRLQRLSLAHCDWVDGLALRGLADRCPALEELDLTACRQLKDEAIVYLAQRRGAGLRSLSLAVNANVGDAAVQELARNCPELHHLDLTGCLRVGSDGVRTLAEYCPVLRSLRVRHCHHVAESSLSRLRKRGVDIDVEPPLHQALVLLQDMAGFAPFVNLQV

SEQ ID NO: 1325 - protein, 604 aa, Homo Sapiens
MMKSQGLVSFKDVAVDFTQEEWQQLDPSQRTLYRDVMLENYSHLVSMGYPVSKPDVISKLEQGEEPWIIKGDISNWIYPDEYQADGRQDRKSNLHNSQSCILGTVSFHHKILKGVTRDGSLCSILKVCQGDGQLQRFLENQDKLFRQVTFVNSKTVTEASGHKYNPLGKIFQECIETDISIQRFHKYDAFKKNLKPNIDLPSCYKSNSRKKPDQSFGGGKSSSQSEPNSNLEKIHNGVIPFDDNQCGNVFRNTQSLIQYQNVETKEKSCVCVTCGKAFAKKSQLIVHQRIHTGKKPYDCGACGKAFSEKFHLVVHQRTHTGEKPYDCSECGKAFSQKSSLIIHQRVHTGEKPYECSECGKAFSQKSPLIIHQRIHTGEKPYECRECGKAFSQKSQLIIHHRAHTGEKPYECTECGKAFCEKSHLIIHKRIHTGEKPYKCAQCEEAFSRKTELITHQLVHTGEKPYECTECGKTFSRKSQLIIHQRTHTGEKPYKCSECGKAFCQKSHLIGHQRIHTGEKPYICTECGKAFSQKSHLPGHQRIHTGEKPYICAECGKAFSQKSDLVLHQRIHTGERPYQCAICGKAFIQKSQLTVHQRIHTVVKS

SEQ ID NO: 1326 - protein, 522 aa, Homo Sapiens
MQPWHGKAMQRASEAGATAPKASARNARGAPMDPTESPAAPEAALPKAGKFGPARKSGSRQKKSAPDTQERPPVRATGARAKKAPQRAQDTQPSDATSAPGAEGLEPPAAREPALSRAGSCRQRGARCSTKPRPPPGPWDVPSPGLPVSAPILVRRDAAPGASKLRAVLEKLKLSRDDISTAAGMVKGVVDHLLLRLKCDSAFRGVGLLNTGSYYEHVKISAPNEFDVMFKLEVPRIQLEEYSNTRAYYFVKFKRNPKENPLSQFLEGEILSASKMLSKFRKIIKEEINDIKDTDVIMKRKRGGSPAVTLLISEKISVDITLALESKSSWPASTQEGLRIQNWLSAKVRKQLRLKPFYLVPKHAKEGNGFQEETWRLSFSHIEKEILNNHGKSKTCCENKEEKCCRKDCLKLMKYLLEQLKERFKDKKHLDKFSSYHVKTAFFHVCTQNPQDSQWDRKDLGLCFDNCVTYFLQCLRTEKLENYFIPEFNLFSSNLIDKRSKEFLTKQIEYERNNEFPVFDEF

SEQ ID NO: 1327 - protein, 1126 aa, Homo Sapiens
MVARSTDSLDGPGEGSVQPLPTAGGPSVKGKPGKRLSAPRGPFPRLADCAHFHYENVDFGHIQLLLSPDREGPSLSGENELVFGVQVTCQGRSWPVLRSYDDFRSLDAHLHRCIFDRRFSCLPELPPPPEGARAAQMLVPLLLQYLETLSGLVDSNLNCGPVLTWMELDNHGRRLLLSEEASLNIPAVAAAHVIKRYTAQAPDELSFEVGDIVSVIDMPPTEDRSWWRGKRGFQVGFFPSECVELFTERPGPGLKADADGPPCGIPAPQGISSLTSAVPRPRGKLAGLLRTFMRSRPSRQRLRQRGILRQRVFGCDLGEHLSNSGQDVPQVLRCCSEFIEAHGVVDGIYRLSGVSSNIQRLRHEFDSERIPELSGPAFLQDIHSVSSLCKLYFRELPNPLLTYQLYGKFSEAMSVPGEEERLVRVHDVIQQLPPPHYRTLEYLLRHLARMARHSANTSMHARNLAIVWAPNLLRSMELESVGMGGAAAFREVRVQSVVVEFLLTHVDVLFSDTFTSAGLDPAGRCLLPRPKSLAGSCPSTRLLTLEEAQARTQGRLGTPTEPTTPKAPASPAERRKGERGEKQRKPGGSSWKTFFALGRGPSVPRKKPLPWLGGTRAPPQPSGSRPDTVTLRSAKSEESLSSQASGAELLGAGGAPASATPTPALSPGRSLRPHLIPLLLRGAEAPLTDACQQEMCSKLRGAQGPLGPDMESPLPPPPLSLLRPGGAPPPPPKNPARLMALALAERAQQVAEQQSQQECGGTPPASQSPFHRSLSLEVGGEPLGTSGSGPPPNSLAHPGAWVPGPPPYLPRQQSDGSLLRSQRPMGTSRRGLRGPAQVSAQLRAGGGGRDAPEAAAQSPCSVPSQVPTPGFFSPAPRECLPPFLGVPKPGLYPLGPPSFQPSSPAPVWRSSLGPPAPLDRGENLYYEIGASEGSPYSGPTRSWSPFRSMPPDRLNASYGMLGQSPPLHRSPDFLLSYPPAPSCFPPDHLGYSAPQHPARRPTPPEPLYVNLALGPRGPSPASSSSSSPPAHPRSRSDPGPPVPRLPQKQRAPWGPRTPHRVPGPWGPPEPLLLYRAAPPAYGRGGELHRGSLYRNGGQRGEGAGPPPPYPTPSWSLHSEGQTRSYC

SEQ ID NO: 1328 - protein, 188 aa, Homo Sapiens
MTETREPAETGGYASLEEDDEDLSPGPEHSSDSEYTLSEPDSEEEEDEEEEEEETTDDPEYDPGYKVKQRLGGGRGGPSRRAPRAAQPPAQPCQLCGRSPLGEAPPGTPPCRLCCPATAPQEAPAPEGRALGEEEEEPPRAGEGRPAGREEEEEEEEEGTYHCTECEDSFDNLGELHGHFMLHARGEV

SEQ ID NO: 1329 - protein, 320 aa, Homo Sapiens
MSKSASPKEPEQLRKLFIGGLSFETTDESLRSHFEQWGTLTDCVVMRDPNTKRSRGFGFVTYATVEEVDAAMNTTPHKVDGRVVEPKRAVSREDSQRPGAHLTVKKIFVGGIKEDTEEHHLRDYFEQYGKIEVIEIMTDRGSGKKRGFAFVTFDDHDSVDKIVIQKYHTVKGHNCEVRKALPKQEMASASSSQRGRRGSGNFGGGRGDGFGGNDNFGRGGNFSGRGGFGGSCGGGGYGGSGDGYNGFGNDGSNFGGGGSYNDFGNYNNQSSNFGPMKGGNFGGRSSGPYGGGGQYFAKPQNQGGYGVSSSSSSYGSGRRF

SEQ ID NO: 1330 - protein, 148 aa, Homo Sapiens
MTPPSTPNPAECGGDLGRRQGLPGRSGCWGWGTGPAGEAGRGRTGDPGSPRYNEPRGREYAIPVPTSEDVGLLAPAAAAFPHIWAGPRSMAWGAEASGSGTNYHSRCRRRRWGVGSRGPWSEQTFSPLGLPPPGAGLTGKDPRGVGCP

SEQ ID NO: 1331 - protein, 423 aa, Homo Sapiens
MAGKRSGWSRAALLQLLLGVNLVVMPPTRARSLRFVTLLYRHGDRSPVKTYPKDPYQEEEWPQGFGQLTKEGMLQHWELGQALRQRYHGFLNTSYHRQEVYVRSTDFDRTLMSAEANLAGLFPPNGMQRFNPNISWQPIPVHTVPITEDRLLKFPLGPCPRYEQLQNETRQTPEYQNESSRNAQFLDMVANETGLTDLTLETVWNVYDTLFCEQTHGLRLPPWASPQTMQRLSRLKDFSFRFLFGIYQQAEKARLQGGVLLAQIRKNLTLMATTSQLPKLLVYSAHDTTLVALQMALDVYNGEQAPYASCHIFELYQEDSGNFSVEMYFRNESDKAPWPLSLPGCPHRCPLQDFLRLTEPVVPKDWQQECQLASGPADTEVIVALAVCGSILFLLIVLLLTVLFRMQAQPPGYRHVADGEDHA

SEQ ID NO: 1332 - protein, 911 aa, Homo Sapiens
MVDYHAANQSYQYGPSSAGNGAGGGGSMGDYMAQEDDWDRDLLLDPAWEKQQRKTFTAWCNSHLRKAGTQIENIDEDFRDGLKLMLLLEVISGERLPKPERGKMRVHKINNVNKALDFIASKGVKLVSIGAEEIVDGNAKMTLGMIWTIILRFAIQDISVEETSAKEGLLLWCQRKTAPYKNVNVQNFHISWKDGLAFNALIHRHRPELIEYDKLRKDDPVTNLNNAFEVAEKYLDIPKMLDAEDIVNTARPDEKAIMTYVSSFYHAFSGAQKAETAANRICKVLAVNQENEHLMEDYEKLASDLLEWIRRTIPWLEDRVPQKTIQEMQQKLEDFRDYRRVHKPPKVQEKCQLEINFNTLQTKLRLSNRPAFMPSEGKMVSDINNGWQHLEQAEKGYEEWLLNEIRRLERLDHLAEKFRQKASIHEAWTDGKEAMLKHRDYETATLSDIKALIRKHEAFESDLAAHQDRVEQIAAIAQELNELDYYDSHNVNTRCQKICDQWDALGSLTHSRREALEKTEKQLEAIDQLHLEYAKRAAPFNNWMESAMEDLQDMFIVHTIEEIEGLISAHDQFKSTLPDADREREAILAIHKEAQRIAESNHIKLSGSNPYTTVTPQIINSKWEKVQQLVPKRDHALLEEQSKQQSNEHLRRQFASQANVVGPWIQTKMEEIGRISIEMNGTLEDQLSHLKQYERSIVDYKPNLDLLEQQHQLIQEALIFDNKHTNYTMEHIRVGWEQLLTTIARTINEVENQILTRDAKGISQEQMQEFRASFNHFDKDHGGALGPEEFKACLISLGYDVENDRQGEAEFNRIMSLVDPNHSGLVTFQAFIDFMSRETTDTDTADQVIASFKVLAGDKNFITAEELRRELPPDQAEYCIARMAPYQGPDAVPGALDYKSFSTALYGESDL

SEQ ID NO: 1333 - protein, 169 aa, Homo Sapiens
MLATRVFSLVGKRAISTSVCVRAHESVVKSEDFSLPAYMDRRDHPLPEVAHVKHLSASQKALKEKEKASWSSLSMDEKVELYRIKFKESFAEMNRGSNEWKTVVGGAMFFIGFTALVIMWQKHYVYGPLPQSFDKEWVAKQTKRMLDMKVNPIQGLASKWDYEKNEWKK

SEQ ID NO: 1334 - protein, 340 aa, Homo Sapiens
MSELEQLRQEAEQLRNQIRDARKACGDSTLTQITAGLDPVGRIQMRTRRTLRGHLAKIYAMHWGTDSRLLVSASQDGKLIIWDSYTTNKVHAIPLRSSWVMTCAYAPSGNFVACGGLDNICSIYSLKTREGNVRVSRELPGHTGYLSCCRFLDDNQIITSSGDTTCALWDIETGQQTVGFAGHSGDVMSLSLAPDGRTFVSGACDASIKLWDVRDSMCRQTFIGHESDINAVAFFPNGYAFTTGSDDATCRLFDLRADQELLMYSHDNIICGITSVAFSRSGRLLLAGYDDFNCNIWDAMKGDRAGVLAGHDNRVSCLGVTDDGMAVATGSWDSFLKIWN

SEQ ID NO: 1335 - protein, 213 aa, Homo Sapiens [sequence omitted]

SEQ ID NO: 1336 - protein, 905 aa, Homo Sapiens
MAKRALHDFIDKYLYAMRLSDETLIDIMTRFRKEMKNGLSRDFNPTATVKMLPTFVRSIPDGSEKGDFIALDLGGSSFRILRVQVNHEKNQNVHMESEVYDTPENIVHGSGSQLFDHVAECLGDFMEKRKIKDKKLPVGFTFSFPCQQSKIDEAILITWTKRFKASGVEGADVVKLLNKAIKKRGDYDANIVAVVNDTVGTMMTCGYDDQHCEVGLIIGTGTNACYMEELRHIDLVEGDEGRMCINTEWGAFGDDGSLEDIRTEFDREIDRGSLNPGKQLFEKMVSGMYLGELVRLILVKMAKEGLLFEGRITPELLTRGKFNTSDVSAIEKNKEGLHNAKEILTRLGVEPSDDDCVSVQHVCTIVSFRSANLVAATLGAILNRLRDNKGTPRLRTTVGVDGSLYKTHPQYSRRFHKTLRRLVPDSDVRFLLSESGSGKGAAMVTAVAYRLAEQHRQIEETLAHFHLTKDMLLEVKKRMRAEMELGLRKQTHNNAVVKMLPSFVRRTPDGTENGDFLALDLGGTNFRVLLVKIRSGKKRTVEMHNKIYAIPIEIMQGTGEELFDHIVSCISDFLDYMGIKGPRMPLGFTFSFPCQQTSLDAGILITWTKGFKATDCVGHDVVTLLRDAIKRREEFDLDVVAVVNDTVGTMMTCAYEEPTCEVGLIVGTGSNACYMEEMKNVEMVEGDQGQMCINMEWGAFGDNGCLDDIRTHYDRLVDEYSLNAGKQRYEKMISGMYLGEIVRNILIDFTKKGFLFRGQISETLKTRGIFETKFLSQIESDRLALLQVRAILQQLGLNSTCDDSILVKTVCGVVSRRAAQLCGAGMAAVVDKIRENRGLDRLNVTVGVDGTLYKLHPHFSRIMHQTVKELSPKCNVSFLLSEDGSGKGAALITAVGVRLRTEASS

SEQ ID NO: 1337 - protein, 351 aa, Homo Sapiens [sequence omitted]

SEQ ID NO: 1338 - protein, 391 aa, Homo Sapiens
MADIDNKEQSELDQDLDDVEEVEEEETGEETKLKARQLTVQMMQNPQILAALQERLDGLVETPTGYIESLPRVVKRRVNALKNLQVKCAQIEAKFYEEVHDLERKYAVLYQPLFDKRFEIINAIYEPTEEECEWKPDEEDEISEELKEKAKIEDEKKDEEKEDPKGIPEFWLTVFKNVDLLSDMVQEHDEPILKHLKDIKVKFSDAGQPMSFVLEFHFEPNEYFTNEVLTKTYRMRSEPDDSDPFSFDGPEIMGCTGCQIDWKKGKNVTLKTIKKKQKHKGRGTVRTVTKTVSNDSFFNFFAPPEVPESGDLDDDAEAILAADFEIGHFLRERIIPRSVLYFTGEAIEDDDDDYDEEGEEADEEGEEEGDEENDPDYDPKKDQNPAECKQQ

SEQ ID NO: 1339 - protein, 370 aa, Homo Sapiens
MSHPSPQAKPSNPSNPRVFFDVDIGGERVGRIVLELFADIVPKTAENFRALCTGEKGIGHTTGKPLHFKGCPFHRIIKKFMIQGGDFSNQNGTGGESIYGEKFEDENFHYKHDREGLLSMANAGRNTNGSQFFITTVPTPHLDGKHVVFGQVIKGIGVARILENVEVKGEKPAKLCVIAECGELKEGDDGGIFPKDGSGDSHPDFPEDADIDLKDVDKILLITEDLKNIGNTFFKSQNWEMAIKKYAEVLRYVDSSKAVIETADRAKLQPIALSCVLNIGACKLKMSNWQGAIDSCLEALELDPSNTKALYRRAQGWQGLKEYDQALADLKKAQGIAPEDKAIQAELLKVKQKIKAQKDKEKAVYAKMFA

SEQ ID NO: 1340 - protein, 390 aa, Homo Sapiens
MTHALEWPSLTAQWLPDVTRPEGKDFSIHRLVLGTHTSDEQNHLVIASVQLPNDDAQFDASHYDSEKGEFGGFGSVSGKIEIEIKINHEGEVNRARYMPQNPCIIATKTPSSDVLVFDYTKHPSKPDPSGECNPDLRLRGHQKEGYGLSWNPNLSGHLLSASDDHTICLWDISAVPKEGKVVDAKTIFTGHTAVVEDVSWHLLHESLFGSVADDQKLMIWDTRSNNTSKPSHSVDAHTAEVNCLSFNPYSEFILATGSADKTVALWDLRNLKLKLHSFESHKDEIFQVQWSPHNETILASSGTDRRLNVWDLSKIGEEQSPEDAEDGPPELLFIHGGHTAKISDFSWNPNEPWVICSVSEDNIMQVWQMAENIYNDEDPEGSVDPEGQGS

SEQ ID NO: 1341 - protein, 1313 aa, Homo Sapiens
MRSAAAAPRSPAVATESRRFAAARWPGWRSLQRPARRSGRGGGGAAPGPYPSAAPPPPGPGPPPSRQSSPPSASDCFGSNGNGGGAFRPGSRRLLGLGGPPRPFVVLLLPLASPGAPPAAPTRASPLGARASPPRSGVSLARPAPGCPRPACEPVYGPLTMSLKPQQQQQQQQQQQQQQQQQQQQQQQPPPAAANVRKPGGSGLLASPAAAPSPSSSSVSSSSATAPSSVVAATSGGGRPGLGRGRNSNKGLPQSTISFDGIYANMRMVHILTSVVGSKCEVQVKNGGIYEGVFKTYSPKCDLVLDAAHEKSTESSSGPKREEIMESILFKCSDFVVVQFKDMDSSYAKRDAFTDSAISAKVNGEHKEKDLEPWDAGELTANEELEALENDVSNGWDPNDMFRYNEENYGVVSTYDSSLSSYTVPLERDNSEEFLKREARANQLAEEIESSAQYKARVALENDDRSEEEKYTAVQRNSSEREGHSINTRENKYIPPGQRNREVISWGSGRQNSPRMGQPGSGSMPSRSTSHTSDFNPNSGSDQRVVNGGVPWPSPCPSPSSRPPSRYQSGPNSLPPRAATPTRPPSRPPSRPSRPPSHPSAHGSPAPVSTMPKRMSSEGPPRMSPKAQRHPRNHRVSAGRGSISSGLEFVSHNPPSEAATPPVARTSPSGGTWSSVVSGVPRLSPKTHRPRSPRQNSIGNTPSGPVLASPQAGIIPTEAVAMPIPAASPTPASPASNRAVTPSSEAKDSRLQDQRQNSPAGNKENIKPNETSPSFSKAENKGISPVVSEHRKQIDDLKKFKNDFRLQPSSTSESMDQLLNKNREGEKSRDLIKDKIEPSAKDSFIENSSSNCTSGSSKPNSPSISPSILSNTEHKRGPEVTSQGVQTSSPACKQEKDDKEEKKDAAEQVRKSTLNPNAKEFNPRSFSQPKPSTTPTSPRPQAQPSPSMVGHQQPTPVYTQPVCFAPNMMYPVPVSPGVQPLYPIPMTPMPVNQAKTYRAVPNMPQQRQDQHHQSAMMHPASAAGPPIAATPPAYSTQYVAYSPQQFPNQPLVQHVPHYQSQHPHVYSPVIQGNARMMAPPTHAQPGLVSSSATQYGAHEQTHAMYACPKLPYNKETSPSFYFAISTGSLAQQYAHPNATLHPHTPHPQPSATPTGQQQSQHGGSHPAPSPVQHHQHQAAQALHLASPQQQSAIYHAGLAPTPPSMTPASNTQSPQNSFPAAQQTVFTIHPSHVQPAYTNPPHMAHVPQAHVQSGMVPSHPTAHAPMMLMTTQPPGGPQAALAQSALQPIPVSTTAHFPYMTHPSVQAHHQQQL

SEQ ID NO: 1342 - protein, 483 aa, Homo Sapiens
MAADEVAGGARKATKSKLFEFLVHGVRPGMPSGARMPHQGAPMGPPGSPYMGSPAVRPGLAPAGMEPARKRAAPPPGQSQAQSQGQPVPTAPARSRSAKRRKMADKILPQRIRELVPESQAYMDLLAFERKLDQTIMRKRVDIQEALKRPMKQKRKLRLYISNTFNPAKPDAEDSDGSIASWELRVEGKLLDDPSKQKRKFSSFFKSLVIELDKDLYGPDNHLVEWHRTPTTQETDGFQVKRPGDLSVRCTLLLMLDYQPPQFKLDPRLARLLGLHTQSRSAIVQALWQYVKTNRLQDSHDKEYINGDKYFQQIFDCPRLKFSEIPQRLTALLLPPDPIVINHVISVDPSDQKKTACYDIDVEVEEPLKGQMSSFLLSTANQQEISALDSKIHETIESINQLKIQRDFMLSFSRDPKGYVQDLLRSQSRDLKVMTDVAGNPEEERRAEFYHQPWSQEAVSRYFYCKIQQRRQELEQSLVVRNT

SEQ ID NO: 1343 - protein, 748 aa, Homo Sapiens
MGRAGAAAVIPGLALLWAVGLGSAAPSPPRLRLSFQELQAWHGLQTFSLERTCCYQALLVDEERGRLFVGAENHVASLNLDNISKRAKKLAWPAPVEWREECNWAGKDIGTECMNFVKLLHAYNRTHLLACGTGAFHPTCAFVEVGHRAEEPVLRLDPGRIEDGKGKSPYDPRHRAASVLVGEELYSGVAADLMGRDFTIFRSLGQRPSLRTEPHDSRWLNEPKFVKVFWIPESENPDDDKIYFFFRETAVEAAPALGRLSVSRVGQICRNDVGGQRSLVNKWTTFLKARLVCSVPGVEGDTHFDQLQDVFLLSSRDHRTPLLYAVFSTSSIFQGSAVCVYSMNDVRRAFLGPFAHKEGPMHQWVSYQGRVPYPRPGMCPSKTFGTFSSTKDFPDDVIQFARNHPLMYNSVLPTGGRPLFLQVGANYTFTQIAADRVAAADGHYDVLFIGTDVGTVLKVISVPKGSRPSAEGLLLEELHVFEDSAAVTSMQISSKRHQLYVASRSAVAQIALHRCAAHGRVCTECCLARDPYCAWDGVACTRFQPSAKRRFRRQDVRNGDPSTLCSGDSSRPALLEHKVFGVEGSSAFLECEPRSLQARVEWTFQRAGVTAHTQVLAEERTERTARGLLLRRLRRRDSGVYLCAAVEQGFTQPLRRLSLHVLSATQAERLARAEEAAPAAPPGPKLWYRDFLQLVEPGGGGSANSLRMCRPQPALQSLPLESRRKGRNRRTHAPEPRAERGPRSATHW

SEQ ID NO: 1344 - protein, 1462 aa, Homo Sapiens
MALYYDHQIEAPDAAGSPSFISWHPVHPFLAVAYISTTSTGSVDIYLEQGECVPDTHVERPFRVASLCWHPTRLVLAVGWETGEVTVFNKQDKEQHTMPLTHTADITVLRWSPSGNCLLSGDRLGVLLLWRLDQRGRVQGTPLLKHEYGKHLTHCIFRLPPPGEDLVQLAKAAVSGDEKALDMFNWKKSSSGSLLKMGSHEGLLFFVSLMDGTVHYVDEKGKTTQVVSADSTIQMLFYMEKREALVVVTENLRLSLYTVPPEGKAEEVMKVKLSGKTGRRADIALIEGSLLVMAVGEAALRFWDIERGENYILSPDEKFGFEKGENMNCVCYCKVKGLLAAGTDRGRVAMWRKVPDFLGSPGAEGKDRWALQTPTELQGNITQIQWGSRKNLLAVNSVISVAILSERAMSSHFHQQVAAMQVSPSLLNVCFLSTGVAHSLRTDMHISGVFATKDAVAVWNGRQVAIFELSGAAIRSAGTFLCETPVLAMHEENVYTVESNRVQVRTWQGTVKQLLLFSETEGNPCFLDICGNFLVVGTDLAHFKSFDLSRREAKAHCSCRSLAELVPGVGGIASLRCSSSGSTISILPSKADNSPDSKICFYDVEMDTVTVFDFKTGQIDRRETLSFNEQETNKSHLFVDEGLKNYVPVNHFWDQSEPRLFVCEAVQETPRSQPQSANGQPQDGRAGPAADVLILSFFISEEHGFLLHESFPRPATSHSLLGMEVPYYYFTRKPEEADREDEVEPGCHHIPQMVSRRPLRDFVGLEDCDKATRDAMLHFSFFVTIGDMDEAFKSIKLIKSEAVWENMARMCVKTQRLDVAKVCLGNMGHARGARALREAEQEPELEARVAVLATQLGMLEDAEQLYRKCKRHDLLNKFYQAAGRWQEALQVAEHHDRVHLRSTYHRYAGHLEASADCSRALSYYEKSDTHRFEVPRMLSEDLPSLELYVNKMKDKTLWRWWAQYLESQGEMDAALHYYELARDHFSLVRIHCFQGNVQKAAQIANETGNLAASYHLARQYESQEEVGQAVHFYTRAQAFKNAIRLCKENGLDDQLMNLALLSSPEDMIEAARYYEEKGVQMDRAVMLYHKAGHFSKALELAFATQQFVALQLIAEDLDETSDPALLARCSDFFIEHSQYERAVELLLAARKYQEALQLCLGQNMSITEEMAEKMTVAKDSSDLPEESRRELLEQIADCCMRQGSYHLATKKYTQAGNKLKAMRALLKSGDTEKITFFASVSRQKEIYIMAANYLQSLDWRKEPEIMKNIIGFYTKGRALDLLAGFYDACAQVEIDEYQNYDKAHGALTEAYKCLAKAKAKSPLDQETRLAQLQSRMALVKRFIQARRTYTEDPKESIKQCELLLEEPDLDSTIRIGDVYGFLVEHYVRKEEYQTAYRFLEEMRRRLPLANMSYYVSPQAVDAVHRGLGLPLPRTVPEQVRHNSMEDARELDEEVVEEADDDP

SEQ ID NO: 1345 - protein, 323 aa, Homo Sapiens
MAPKQDPKPKFQEGERVLCFHGPLLYEAKCVKVAIKDKQVKYFIHYSGWNKNWDEWVPESRVLKYVDTNLQKQRELQKANQEQYAEGKMRGAAPGKKTSGLQQKNVEVKTKKNKQKTPGNGDGGSTSETPQPPRKKRARVDPTVENEETFMNRVEVKVKIPEELKPWLVDDWDLITRQKQLFYLPAKKNVDSILEDYANYKKSRGNTDNKEYAVNEVVAGIKEYFNVMLGTQLLYKFERPQYAEILADHPDAPMSQVYGAPHLLRLFVRIGAMLAYTPLDEKSLALLLNYLHDFLKYLAKNSATLFSASDYEVAPPEYHRKAV

SEQ ID NO: 1346 - protein, 361 aa, Homo Sapiens
MFAKGKGSAVPSDGQAREKLALYVYEYLLHVGAQKSAQTFLSEIRWEKNITLGEPPGFLHSWWCVFWDLYCAAPERRDTCEHSSEAKAFHDYSAAAAPSPVLGNIPPNDGMPGGPIPPGFFQPFMSPRYAGGPRPPIRMGNQPPGGVPGTQPLLPNSMDPTRQQGHPNMGGSMQRMNPPRGMGPMGPGPQNYGSGMRPPPNSLGPAMPGINMGPGAGRPWPNPNSANSIPYSSSSPGTYVGPPGGGGPPGTPIMPSPADSTNSSDNIYTMINPVPPGGSRSNFPMGPGSDGPMGGMGGMEPHHMNGSLGSGDIDGLPKNSPNNISGISNPPGTPRDDGELGGNFLHSFQNDNYSPSMTMSV

SEQ ID NO: 1347 - protein, 550 aa, Homo Sapiens
MSTSSLRRQMKNIVHNYSEAEIKVREATSNDPWGPSSSLMSEIADLTYNVVAFSEIMSMIWKRLNDHGKNWRHVYKAMTLMEYLIKTGSERVSQQCKENMYAVQTLKDFQYVDRDGKDQGVNVREKAKQLVALLRDEDRLREERAHALKTKEKLAQTATASSAAVGSGPPPEAEQAWPQSSGEEELQLQLALAMSKEEADQEERIRRGDDLRLQMAIEESKRETGGKEESSLMDLADVFTAPAPAPTTDPWGGPAPMAAAVPTAAPTSDPWGGPPVPPAADPWGGPAPTPASGDPWRPAAPAGPSVDPWGGTPAPAAGEGPTPDPWGSSDGGVPVSGPSASDPWTPAPAFSDPWGGSPAKPSTNGTTAGGFDTEPDEFSDFDRLRTALPTSGSSAGELELLAGEVPARSPGAFDMSGVRGSLAEAVGSPPPAATPTPTPPTRKTPESFLGPNAALVDLDSLVSRPGPTPPGAKASNPFLPGGGPATGPSVTNPFQPAPPATLTLNQLRLSPVPPVPGAPPTYISPLGGGPGLPPMMPPGPPAPNTNPFLL

SEQ ID NO: 1348 - protein, 550 aa, Homo Sapiens; identical to SEQ ID NO: 1347

SEQ ID NO: 1349 - protein, 1063 aa, Homo Sapiens
MPHLPLASFRPPFWGLRHSRGLPRFHSVSTQSEPHGSPISRRNREAKQKRLREKQATLEAEIAGESKSPAESIKAWRPKELVLYEIPTKPGEKKDVSGPLPPAYSPRYVEAAWYPWWVREGFFKPEYQARLPQATGETFSMCIPPPNVTGSLHIGHALTVAIQDALVRWHRMRGDQVLWVPGSDHAGIATQAVVEKQLWKERGVRRHELSREAFLREVWQWKEAKGGEICEQLRALGASLDWDRECFTMDVGSSVAVTEAFVRLYKAGLLYRNHQLVNWSCALRSAISDIEVENRPLPGHTQLRLPGCPTPVSFGLLFSVAFPVDGEPDAEVVVGTTRPETLPGDVAVAVHPDDSRYTHLHGRQLRHPLMGQPLPLITDYAVQPHVGTGAVKVTPAHSPADAEMGARHGLSPLNVIAEDGTMTSLCGDWLQGLHRFVAREKIMSVLSEWGLFRGLQNHPMVLPICSRSGDVIEYLLKNQWFVRCQEMGARAAKAVESGALELSPSFHQKNWQHWFSHIGDWCVSRQLWWGHQIPAYLVVEDHAQGEEDCWVVGRSEAEAREVAAELTGRPGAELTLERDPDVLDTWFSSALFPFSALGWPQETPDLARFYPLSLLETGSDLLLFWVGRMVMLGTQLTGQLPFSKVLLHPMVRDRQGRKMSKSLGNVLDPRDIISGVEMQVLQEKLRSGNLDPAELAIVAAAQKKDFPHGIPECGTDALRFTLCSHGVQAGDLHLSVSEVQSCRHFCNKIWNALRFILNALGEKFVPQPAEELSPSSPMDAWILSRLALAAQECERGFLTRELSLVTHALHHFWLHNLCDVYLEAVKPVLWHSPRPLGPPQVLFSCADLGLRLLAPLMPFLAEELWQRLPPRPGCPPAPSISVAPYPSACSLEHWRQPELERRFSRVQEVVQVLRALRATYQLTKARPRVLLQSSEPGDQGLFEAFLEPLGTLGYCGAVGLLPPGAAAPSGWAQAPLSDTAQVYMELQGLVDPQIQLPLLAARRYKLQKQLDSLTARTPSEGEAGTQRQQKLSSLQLELSKLDKAASHLRQLMDEPPAPGSPEL

SEQ ID NO: 1350 - protein, 450 aa, Homo Sapiens
MGAPPGYRPSAWVHLLHQLPRADFQLRPVPSVFAPQEQEYQQALLLVAALAGLGLGLSLIFIAVYLIRFCCCRPPEPPGSKIPSPGGGCVTWSCIVALLAGCTGIGIGFYGNSETSDGVSQLSSALLHANHTLSTIDHLVLETVERLGEAVRTELTTLEEVLEPRTELVAAARGARRQAEAAAQQLQGLAFWQGVPLSPLQVAENVSFVEEYRWLAYVLLLLLELLVCLFTLLGLAKQSKWLVIVMTVMSLLVLVLSWGSMGLEAATAVGLSDFCSNPDPYVLNLTQEETGLSSDILSYYLLCNRAVSNPFQQRLTLSQRALANIHSQLLGLEREAVPQFPSAQKPLLSLEETLNVTEGNFHQLVALLHCRSLHKDYGAALRGLCEDALEGLLFLLLFSLLSAGALATALCSLPRAWALFPPSDDYDDTDDDDPFNPQESKRFVQWQSSI

SEQ ID NO: 1351 - protein, 4981 aa, Homo Sapiens
MDLAPDRATGRPWLPLHTLSVSQLLRVFWLLSLLPGQAWVHGAEPRQVFQVLEEQPPGTLVGTIQTRPGFTYRLSESHALFAINSSTGALYTTSTIDRESLPSDVINLVVLSSAPTYPTEVRVLVRDLNDNAPVFPDPSIVVTFKEDSSSGRQVILDTATDSDIGSNGVDHRSYRIIRGNEAGRFRLDITLNPSGEGAFLHLVSKGGLDREVTPQYQLLVEVEDKGEPKRRGYLQVNVTVQDINDNPPVFGSSHYQAGVPEDAVVGSSVLQVAAADADEGTNADIRYRLQDEGTPFQMDPETGLITVREPLDFEARRQYSLTVQAMDRGVPSLTGRAEALIQLLDVNDNDPVVKFRYFPATSRYASVDENAQVGTVVALLTVTDADSPAANGNISVQILGGNEQRHFEVQSSKVPNLSLIKVASALDRERIPSYNLTVSVSDNYGAPPGAAVQARSSVASLVIFVNDINDHPPVFSQQVYRVNLSEEAPPGSYVSGISATDGDSGLNANLRYSIVSGNGLGWFHISEHSGLVTTGSSGGLDRELASQIVLNISARDQGVHPKVSYAQLVVTLLDVNDEKPVFSQPEGYDVSVVENAPTGTELLMLRATDGDLGDNGTVRFSLQEAETDRRSFRLDPVSGRLSTISSLDREEQAFYSLLVLATDLGSPPQSSMARINVSLLDINDNSPVFYPVQYFAHIKENEPGGSYITTVSATDPDLGTNGTVKYSISAGDRSRFQVNAQSGVISTRMALDREEKTAYQLQIVATDGGNLQSPNQAIVTITVLDTQDNPPVFSQVAYSFVVFENVALGYHVGSVSASTMDLNSNISYLITTGDQKGMFAINQVTGQLTTANVIDREEQSFYQLKVVASGGTVTGDTMVNITVKDLNDNSPHFLQAIESVNVVENWQAGHSIFQAKAVDPDEGVNGMVLYSLKQNPKNLFAINEKNGTISLLGPLDVHAGSYQIEILASDMGVPQLSSSVILTVYVHDVNDNSPVFDQLSYEVTLSESEPVNSRFFKVQASDKDSGANGEIAYTIAEGNTGDAFGIFPDGQLYIKSELDRELQDRYVLMVVASDRAVEPLSATVNVTVILEDVNDNRPLFNSTNYTFYFEEEQRAGSFVGKVSAVDKDFGPNGEVRYSFEMVQPDFELHAISGEITNTHQFDRESLMRRRGTAVFSFTVIATDQGIPQPLKDQATVHVYMKDINDNAPKFLKDFYQATISESAANLTQVLRVSASDVDEGNNGLIHYSIIKGNEERQFAIDSTSGQVTLIGKLDYEATPAYSLVIQAVDSGTIPLNSTCTLNIDILDENDNTPSFPKSTLFVDVLENMRIGELVSSVTATDSDSGDNADLYYSITGTNNHGTFSISPNTGSIFLAKKLDFETQSLYKLNITAKDQGRPPRSSTMSVVIHVRDFNDNPPSFPPGDIFKSIVENIPIGTSVISVTAHDPDADINGQLSYTIIQQMPRGNHFTIDEVKGTIYTNAEIDREFANLFELTVKANDQAVPIETRRYALKNVTILVTDLNDNVPMFISQNALAADPSAVIGSVLTTIMAADPDEGANGEIEYEIINGDTDTFIVDRYSGDLRVASALVPSQLIYNLIVSATDLGPERRKSTTELTIILQGLDGPVFTQPKYITILKEGEPIGTNVISIEAASPRGSEAPVEYYIVSVRCEEKTVGRLFTIGRHTGIIQTAAILDREQGACLYLVDVYAIEKSTAFPRTQRAEVEITLQDINDNPPVFPTDMLDLTVEENIGDGSKIMQLTAMDADEGANALVTYTIISGADDSFRIDPESGDLIATRRLDRERRSKYSLLVRADDGLQSSDMRINITVSDVNDHTPKFSRPVYSFDIPEDTIPGSLVAAILATDDDSGVNGEITYIVNEDDEDGIFFLNPITGVFNLTRLLDYEVQQYYILTVRAEDGGGQFTTIRVYFNILDVNDNPPIFSLNSYSTSLMENLPVGSTVLVFNVTDADDGINSQLTYSIASGDSLGQFTVDKNGVLKVLKALDRESQSFYNLVVQVHDLPQIPASRFTSTAQVSIILLDVNDNPPTFLSPKLTYIPENTPIDTVVFKAQATDPDSGPNSYIEYTLLNPLGNKFSIGTIDGEVRLTGELDREEVSNYTLTVVATDKGQPSLSSSTEVVVMVLDINDNNPIFAQALYKVEINENTLTGTDIIQVFAADGDEGTNGQVRYGIVNGNTNQEFRIDSVTGAITVAKPLDREKTPTYHLTVQATDRGSTPRTDTSTVSIVLLDINDFVPVFELSPYSVNVPENLGTLPRTILQVVARDDDRGSNSKLSYVLFGGNEDNAFTLSASGELGVTQSLDRETKERFVLMITATDSGSPALTGTGTINVIVDDVNDNVPTFASKAYFTTIPEDAPTGTDVLLVNASDADASKNAVIRIIGGNSQFTINPSTGQIITSALLDRETKDNYTLVVVCSDAGSPEPLSSSTSVLVTVTDVNDNPPRFQHHPYVTHIPSPTLPGSFVFAVTVTDADIGPNSELHYSLSGRNSEKFHIDPLRGAIMAAGPLNGASEVTFSVHVKDGGSFPKTDSTTVTVRFVNKADFPKVRAKEQTFMFPENQPVSSLVTTITGSSLRGEPMSYYIASGNLGNTFQIDQLTGQVSISQPLDFEKIQKYVVWIEARDGGFPPFSSYEKLDITVLDVNDNAPIFKEDPFISEILENLSPRKILTVSAMDKDSGPNGQLDYEIVNGNMENSFSINHATGEIRSVRPLDREKVSHYVLTIKSSDKGSPSQSTSVKVMINILDENDNAPRFSQIFSAHVPENSPLGYTVTRVTTSDEDIGINAISRYSIMDASLPFTINPSTGDIVISRPLNREDTDRYRIRVSAHDSGWTVSTDVTIFVTDINDNAPRFSRTSYYLDCPELTEIGSKVTQVFATDPDEGSNGQVFYFIKSQSEYFRINATTGEIFNKQILKYQNVTGFSNVNINRHSFIVTSSDRGKPSLISETTVTINIVDSNDNAPQFLKSKYFTPVTKNVKVGTKLIRVTAIDDKDFGLNSEVEYFISNDNHLGKFKLDNDTGWISVASSLISDLNQNFFITVTAKDKGNPPLSSQATVHITVTEENYHTPEFSQSHMSATIPESHSIGSIVRTVSARDRDAAMNGLIKYSISSGNEEGIFAINSSTGILTLAKALDYELCQKHEMTISAIDGGWVARTGYCSVTVNVIDVNDNSPVFLSDDYFPTVLENAPSGTTVIHLNATDADSGTNAVIAYTVQSSDSDLFVIDPNTGVITTQGFLDFETKQSYHLTVKAFNVPDEERCSFATVNIQLKGTNEYVPRFVSKLYYFEISEAAPKGTIVGEVFASDRDLGTDGEVHYLIFGNSRKKGFQINKKTGQIYVSGILDREKEERVSLKVLAKNFGSIRGADIDEVTVNVTVLDANDPPIFTLNIYSVQISEGVPIGTHVTFVSAFDSDSIPSWSRFSYFIGSGNENGAFSINPQTGQITVTAELDRETLPIYNLSVLAVDSGTPSATGSASLLVTLEDINDNGPMLTVSEGEVMENKRPGTLVMTLQSTDPDLPPNQGPFTYYLLSTGPATSYFSLSTAGVLSTTREIDREQIADFYLSVVTKDSGVPQMSSTGTVHITVIDQNDNPSQSRTVEIFVNYYGNLFPGGILGSVKPQDPDVLDSFHCSLTSGVTSLFSIPGGTCDLNSQPRSTDGTFDLTVLSNDGVHSTVTSNIRVFFAGFSNATVDNSILLRLGVPTVKDFLTNHYLHFLRIASSQLTGLGTAVQLYSAYEENNRTFLLAAVKRNHNQYVNPSGVATFFESIKEILLRQSGVKVESVDHDSCVHGPCQNGGSCLRRLAVSSVLKSRESLPVIIVANEPLQPFLCKCLPGYAGSWCEIDIDECLPSPCHSGGTCHNLVGGFSCSCPDGFTGRACERDINECLQSPCKNGAICQNFPGSFNCVCKTGYTGKMCESSVNYCECNPCFNGGSCQSGVDSYYCHCPFGVFGKHCELNSYGFEELSYMEFPSLDPNNNYIYVKFATIKSHALLLYNYDNQTGDRAEFLALEIAEERLRFSYNLGSGTYKLTTMKKVSDGHFHTVIARRAGMAASLTVDSCSENQEPGYCTVSNVAVSDDWTLDVQPNRVTVGGIRSLEPILQRRGHVESHDFVGCIMEFAVNGRPLEPSQALAAQGILDQCPRLEGACTRSPCQHGGTCMDYWSWQQCHCKEGLTGKYCEKSVTPDTALSLEGKGRLDYHMSQNEKREYLLRQSLRGAMLEPFGVNSLEVKFRTRSENGVLIHIQESSNYTTVKIKNGKVYFTSDAGIAGKVERNIPEVYVADGHWHTFLIGKNGTATVLSVDRIYNRDIIHPTQDFGGLDVLTISLGGIPPNQAHRDAQTAGFDGCIASMWYGGESLPFSGKHSLASISKTDPSVKIGCRGPNICASNPCWGDLLCINQWYAYRCVPPGDCASHPCQNGGSCEPGLHSGFTCSCPDSHTGRTCEMVVACLGVLCPQGKVCKAGSPAGHVCVLSQGPEEISLPLWAVPAIVGSCATVLALLVLSLILCNQCRGKKAKNPKEEKKPKEKKKKGSENVAFDDPDNIPPYGDDMTVRKQPEGNPKPDIIERENPYLIYDETDIPHNSETIPSAPLASPEQEIEHYDIDNASSIAPSDADIIQHYKQFRSHTPKFSIQRHSPLGFARQSPMPLGASSLTYQPSYGQGLRTSSLSHSACPTPNPLSRHSPAPFSKSSTFYRNSPARELHLPIRDGNTLEMHGDTCQPGIFNYATRLGRRSKSPQAMASHGSRPGSRLKQPIGQIPLESSPPVGLSIEEVERLNTPRPRNPSICSADHGRSSSEEDCRRPLSRTRNPADGIPAPESSSDSDSHESFTCSEMEYDREKPMVYTSRMPKLSQVNESDADDEDNYGARLKPRRYHGRRAEGGPVGTQAAAPGTADNTLPMKLGQQAGTFNWDNLLNWGPGFGHYVDVFKDLASLPEKAAANEEGKAGTTKPVPKDGEAEQYV

SEQ ID NO: 1352 - protein, 620 aa, Homo Sapiens
MQVSKRMLAGGVRSMPSPLLACWQPILLLVLGSVLSGSATGCPPRCECSAQDRAVLCHRKRFVAVPEGIPTETRLLDLGKNRIKTLNQDEFASFPHLEELELNENIVSAVEPGAFNNLFNLRTLGLRSNRLKLIPLGVFTGLSNLTKLDISENKIVILLDYMFQDLYNLKSLEVGDNDLVYISHRAFSGLNSLEQLTLEKCNLTSIPTEALSHLHGLIVLRLRHLNINAIRDYSFKRLYRLKVLEISHWPYLDTMTPNCLYGLNLTSLSITHCNLTAVPYLAVRHLVYLRFLNLSYNPISTIEGSMLHELLRLQEIQLVGGQLAVVEPYAFRGLNYLRVLNVSGNQLTTLEESVFHSVGNLETLILDSNPLACDCRLLWVFRRRWRLNFNRQQPTCATPEFVQGKEFKDFPDVLLPNYFTCRRARIRDRKAQQVFVDEGHTVQFVCRADGDPPPAILWLSPRKHLVSAKSNGRLTVFPDGTLEVRYAQVQDNGTYLCIAANAGGNDSMPAHLHVRSYSPDWPHQPNKTFAFISNQPGEGEANSTRATVPFPFDIKTLIIATTMGFISFLGVVLFCLVLLFLWSRGKGNTKHNIEIEYVPRKSDAGISSADAPRKFNMKMI

SEQ ID NO: 1353 - protein, 2436 aa, Homo Sapiens
MGFLHQLQLLLWKNVTLKRRSPWVLAFEIFIPLVLFFILLGLRQKKPTISVKEVSFYTAAPLTSAGILPVMQSLCPDGQRDEFGFLQYANSTVTQLLERLDRVVEEGNLFDPARPSLGSELEALRQHLEALSAGPGTSGSHLDRSTVSSFSLDSVARNPQELWRFLTQNLSLPNSTAQALLAARVDPPEVYHLLFGPSSALDSQSGLHKGQEPWSRLGGNPLFRMEELLLAPALLEQLTCTPGSGELGRILTVPESQKGALQGYRDAVCSGQAAARARRFSGLSAELRNQLDVAKVSQQLGLDAPNGSDSSPQAPPPRRLQALLGDLLDAQKVLQDVDVLSALALLLPQGACTGRTPGPPASGAGGAANGTGAGAVMGPNATAEEGAPSAAALATPDTLQGQCSAFVQLWAGLQPILCGNNRTIEPEALRRGNMSSLGFTSKEQRNLGLLVHLMTSNPKILYAPAGSEVDRVILKANETFAFVGNVTHYAQVWLNISAEIRSFLEQGRLQQHLRWLQQYVAELRLHPEALNLSLDELPPALRQDNFSLPSGMALLQQLDTIDNAACGWIQFMSKVSVDIFKGFPDEESIVNYTLNQAYQDNVTVFASVIFQTRKDGSLPPHVHYKIRQNSSFTEKTNEIRRAYWRPGPNTGGRFYFLYGFVWIQDMMERAIIDTFVGHDVVEPGSYVQMFPYPCYTRDDFLFVIEHMMPLCMVISWVYSVAMTIQHIVAEKEHRLKEVMKTMGLNNAVHWVAWFITGFVQLSISVTALTAILKYGQVLMHSHVVIIWLFLAVYAVATIMFCFLVSVLYSKAKLASACGGIIYFLSYVPYMYVAIREEVAHDKITAFEKCIASLMSTTAFGLGSKYFALYEVAGVGIQWHTFSQSPVEGDDFNLLLAVTMLMVDAVVYGILTWYIEAVHPGMYGLPRPWYFPLQKSYWLGSGRTEAWEWSWPWARTPRLSVMEEDQACAMESRRFEETRGMEEEPTHLPLVVCVDKLTKVYKDDKKLALNKLSLNLYENQVVSFLGHNGAGKTTTMSILTGLFPPTSGSATIYGHDIRTEMDEIRKNLGMCPQHNVLFDRLTVEEHLWFYSRLKSMAQEEIRREMDKMIEDLELSNKRHSLVQTLSGGMKRKLSVAIAFVGGSRAIILDEPTAGVDPYARRAIWDLILKYKPGRTILLSTHHMDEADLLGDRIAIISHGKLKCCGSPLFLKGTYGDGYRLTLVKRPAEPGGPQEPGLASSPPGRAPLSSCSELQVSQFIRKHVASCLLVSDTSTELSYILPSEAAKKGAFERLFQHLERSLDALHLSSFGLMDTTLEEVFLKVSEEDQSLENSEADVKESRKDVLPGAEGPASGEGHAGNLARCSELTQSQASLQSASSVGSARGDEGAGYTDVYGDYRPLFDNPQDPDNVSLQEVEAEALSRVGQGSRKLDGGWLKVRQFHGLLVKRFHCARRNSKALFSQILLPAFFVCVAMTVALSVPEIGDLPPLVLSPSQYHNYTQPRGNFIPYANEERREYRLRLSPDASPQQLVSTFRLPSGVGATCVLKSPANGSLGPTLNLSSGESRLLAARFFDSMCLESFTQGLPLSNFVPPPPSPAPSDSPASPDEDLQAWNVSLPPTAGPEMWTSAPSLPRLVREPVRCTCSAQGTGFSCPSSVGGHPPQMRVVTGDILTDITGHNVSEYLLFTSDRFRLHRYGAITFGNVLKSIPASFGTRAPPMVRKIAVRRAAQVFYNNKGYHSMPTYLNSLNNAILRANLPKSKGNPAAYGITVTNHPMNKTSASLSLDYLLQGTDVVIAIFIIVAMSFVPASFVVFLVAEKSTKAKHLQFVSGCNPIIYWLANYVWDMLNYLVPATCCVIILFVFDLPAYTSPTNFPAVLSLFLLYGWSITPIMYPASFWFEVPSSAYVFLIVINLFIGITATVATFLLQLFEHDKDLKVVNSYLKSCFLIFPNYNLGHGLMEMAYNEYINEYYAKIGQFDKMKSPFEWDIVTRGLVAMAVEGVVGFLLTIMCQYNFLRRPQRMPVSTKPVEDDVDVASERQRVLRGDADNDMVKIENLTKVYKSRKIGRILAVDRLCLGVRPGECFGLLGVNGAGKTSTFKMLTGDESTTGGEAFVNGHSVLKELLQVQQSLGYCPQCDALFDELTAREHLQLYTRLRGISWKDEARVVKWALEKLELTKYADKPAGTYSGGNKRKLSTAIALIGYPAFIFLDEPTTGMDPKARRFLWNLILDLIKTGRSVVLTSHSMEECEALCTRLAIMVNGRLRCLGSIQHLKNRFGDGYMITVRTKSSQSVKDVVRFFNRNFPEAMLKERHHTKVQYQLKSEHISLAQVFSKMEQVSGVLGIEDYSVSQTTLDNVFVNFAKKQSDNLEQQETEPPSALQSPLGCLLSLLRPRSAPTELRALVADEPEDLDTEDEGLISFEEERAQLSFNTDTLC

SEQ ID NO: 1354 - protein, 374 aa, Homo Sapiens
MANEVIKCKAAVAWEAGKPLSIEEIEVAPPKAHEVRIKIIATAVCHTDAYTLSGADPEGCFPVILGHEGAGIVESVGEGVTKLKAGDTVIPLYIPQCGECKFCLNPKTNLCQKIRVTQGKGLMPDGTSRFTCKGKTILHYMGTSTFSEYTVVADISVAKIDPLAPLDKVCLLGCGISTGYGAAVNTAKLEPGSVCAVFGLGGVGLAVIMGCKVAGASRIIGVDINKDKFARAKEFGATECINPQDFSKPIQEVLIEMTDGGVDYSFECIGNVKVMRAALEACHKGWGVSVVVGVAASGEEIATRPFQLVTGRTWKGTAFGGWKSVESVPKLVSEYMSKKIKVDEFVTHNLSFDEINKAFELMHSGKSIRTVVKI

SEQ ID NO: 1355 - protein, 1014 aa, Homo Sapiens
MAESSDKLYRVEYAKSGRASCKKCSESIPKDSLRMAIMVQSPMFDGKVPHWYHFSCFWKVGHSIRHPDVEVDGFSELRWDDQQKVKKTAEAGGVTGKGQDGIGSKAEKTLGDFAAEYAKSNRSTCKGCMEKIEKGQVRLSKKMVDPEKPQLGMIDRWYHPGCFVKNREELGFRPEYSASQLKGFSLLATEDKEALKKQLPGVKSEGKRKGDEVDGVDEVAKKKSKKEKDKDSKLEKALKAQNDLIWNIKDELKKVCSTNDLKELLIFNKQQVPSGESAILDRVADGMVFGALLPCEECSGQLVFKSDAYYCTGDVTAWTKCMVKTQTPNRKEWVTPKEFREISYLKKLKVKKQDRIFPPETSASVAATPPPSTASAPAAVNSSASADKPLSNMKILTLGKLSRNKDEVKAMIEKLGGKLTGTANKASLCISTKKEVEKMNKKMEEVKEANIRVVSEDFLQDVSASTKSLQELFLAHILSPWGAEVKAEPVEVVAPRGKSGAALSKKSKGQVKEEGINKSEKRMKLTLKGGAAVDPDSGLEHSAHVLEKGGKVFSATLGLVDIVKGTNSYYKLQLLEDDKENRYWIFRSWGRVGTVIGSNKLEQMPSKEDAIEHFMKLYEEKTGNAWHSKNFTKYPKKFYPLEIDYGQDEEAVKKLTVNPGTKSKLPKPVQDLIKMIFDVESMKKAMVEYEIDLQKMPLGKLSKRQIQAAYSILSEVQQAVSQGSSDSQILDLSNRFYTLIPHDFGMKKPPLLNNADSVQAKVEMLDNLLDIEVAYSLLRGGSDDSSKDPIDVNYEKLKTDIKVVDRDSEEAEIIRKYVKNTHATTHNAYDLEVIDIFKIEREGECQRYKPFKQLHNRRLLWHGSRTTNFAGILSQGLRIAPPEAPVTGYMFGKGIYFADMVSKSANYCHTSQGDPIGLILLGEVALGNMYELKHASHISKLPKGKHSVKGLGKTTPDPSANISLDGVDVPLGTGISSGVNDTSLLYNEYIVYDIAQVNLKYLLKLKFNFKTSLW

SEQ ID NO: 1356 - protein, 1013 aa, Homo Sapiens
MGDKKDDKDSPKKNKGKERRDLDDLKKEVAMTEHKMSVEEVCRKYNTDCVQGLTHSKAQEILARDGPNALTPPPTTPEWVKFCRQLFGGFSILLWIGAILCFLAYGIQAGTEDDPSGDNLYLGIVLAAVVIITGCFSYYQEAKSSKIMESFKNMVPQQALVIREGEKMQVNAEEVVVGDLVEIKGGDRVPADLRIISAHGCKVDNSSLTGESEPQTRSPDCTHDNPLETRNITFFSTNCVEGTARGVVVATGDRTVMGRIATLASGLEVGKTPIAIEIEHFIQLITGVAVFLGVSFFILSLILGYTWLEAVIFLIGIIVANVPEGLLATVTVCLTLTAKRMARKNCLVKNLEAVETLGSTSTICSDKTGTLTQNRMTVAHMWFDNQIHEADTTEDQSGTSFDKSSHTWVALSHIAGLCNRAVFKGGQDNIPVLKRDVAGDASESALLKCIELSSGSVKLMRERNKKVAEIPFNSTNKYQLSIHETEDPNDNRYLLVMKGAPERILDRCSTILLQGKEQPLDEEMKEAFQNAYLELGGLGERVLGFCHYYLPEEQFPKGFAFDCDDVNFTTDNLCFVGLMSMIDPPRAAVPDAVGKCRSAGIKVIMVTGDHPITAKAIAKGVGIISEGNETVEDIAARLNIPVSQVNPRDAKACVIHGTDLKDFTSEQIDEILQNHTEIVFARTSPQQKLIIVEGCQRQGAIVAVTGDGVNDSPALKKADIGVAMGIAGSDVSKQAADMILLDDNFASIVTGVEEGRLIFDNLKKSIAYTLTSNIPEITPFLLFIMANIPLPLGTITILCIDLGTDMVPAISLAYEAAESDIMKRQPRNPRTDKLVNERLISMAYGQIGMIQALGGFFSYFVILAENGFLPGNLVGIRLNWDDRTVNDLEDSYGQQWTYEQRKVVEFTCHTAFFVSIVVVQWADLIICKTRRNSVFQQGMKNKILIFGLFEETALAAFLSYCPGMDVALRMYPLKPSWWFCAFPYSFLIFVYDEIRKLILRRNPGGWVEKETYY

SEQ ID NO: 1357 - protein, 1271 aa, Homo Sapiens
MVDPVGFAEAWKAQFPDSEPPRMELRSVGDIEQELERCKASIRRLEQEVNQERFRMIYLQTLLAKEKKSYDRQRWGFRRAAQAPDGASEPRASASRPQPAPADGADPPPAEEPEARPDGEGSPGKARPGTARRPGAAASGERDDRGPPASVAALRSNFERIRKGHGQPGADAEKPFYVNVEFHHERGLVKVNDKEVSDRISSLGSQAMQMERKKSQHGAGSSVGDASRPPYRGRSSESSCGVDGDYEDAELNPRFLKDNLIDANGGSRPPWPPLEYQPYQSIYVGGMMEGEGKGPLLRSQSTSEQEKRLTWPRRSYSPRSFEDCGGGYTPDCSSNENLTSSEEDFSSGQSSRVSPSPTTYRMFRDKSRSPSQNSQQSFDSSSPPTPQCHKRHRHCPVVVSEATIVGVRKTGQIWPNDGEGAFHGDADGSFGTPPGYGCAADRAEEQRRHQDGLPYIDDSPSSSPHLSSKGRGSRDALVSGALESTKASELDLEKGLEMRKWVLSGILASEETYLSHLEALLLPMKPLKAAATTSQPVLTSQQIETIFFKVPELYEIHKEFYDGLFPRVQQWSHQQRVGDLFQKLASQLGVYRAFVDNYGVAMEMAEKCCQANAQFAEISENLRARSNKDAKDPTTKNSLETLLYKPVDRVTRSTLVLHDLLKHTPASHPDHPLLQDALRISQNFLSSINEEITPRRQSMTVKKGEHRQLLKDSFMVELVEGARKLRHVFLFTDLLLCTKLKKQSGGKTQQYDCKWYIPLTDLSFQMVDELEAVPNIPLVPDEELDALKIKISQIKNDIQREKRANKGSKATERLKKKLSEQESLLLLMSPSMAFRVHSRNGKSYTFLISSDYERAEWRENIREQQKKCFRSFSLTSVELQMLTNSCVKLQTVHSIPLTINKEDDESPGLYGFLNVIVHSATGFKQSSNLYCTLEVDSFGYFVNKAKTRVYRDTAEPNWNEEFEIELEGSQTLRILCYEKCYNKTKIPKEDGESTDRLMGKGQVQLDPQALQDRDWQRTVIAMNGIEVKLSVKFNSREFSLKRMPSRKQTGVFGVKIAVVTKRERSKVPYIVRQCVEEIERRGMEEVGIYRVSGVATDIQALKAAFDVNNKDVSVMMSEMDVNAIAGTLKLYFRELPEPLFTDEFYPNFAEGIALSDPVAKESCMLNLLLSLPEANLLTFLFLLDHLKRVAEKEAVNKMSLHNLATVFGPTLLRPSEKESKLPANPSQPITMTDSWSLEVMSQVQVLLYFLQLEAIPAPDSKRQSILFSTEV

SEQ ID NO: 1358 - protein, 724 aa, Homo Sapiens
MPEEVHHGEEEVETFAFQAEIAQLMSLIINTFYSNKEIFLRELISNASDALDKIRYESLTDPSKLDSGKELKIDIIPNPQERTLTLVDTGIGMTKADLINNLGTIAKSGTKAFMEALQAGADISMIGQFGVGFYSAYLVAEKVVVITKHNDDEQYAWESSAGGSFTVRADHGEPIGRGTKVILHLKEDQTEYLEERRVKEVVKKHSQFIGYPITLYLEKEREKEISDDEAEEEKGEKEEEDKDDEEKPKIEDVGSDEEDDSGKDKKKKTKKIKEKYIDQEELNKTKPIWTRNPDDITQEEYGEFYKSLTNDWEDHLAVKHFSVEGQLEFRALLFIPRRAPFDLFENKKKKNNIKLYVRRVFIMDSCDELIPEYLNFIRGVVDSEDLPLNISREMLQQSKILKVIRKNIVKKCLELFSELAEDKENYKKFYEAFSKNLKLGIHEDSTNRRRLSELLRYHTSQSGDEMTSLSEYVSRMKETQKSIYYITGESKEQVANSAFVERVRKRGFEVVYMTEPIDEYCVQQLKEFDGKSLVSVTKEGLELPEDEEEKKKMEESKAKFENLCKLMKEILDKKVEKVTISNRLVSSPCCIVTSTYGWTANMERIMKAQALRDNSTMGYMMAKKHLEINPDHPIVETLRQKAEADKNDKAVKDLVVLLFETALLSSGFSLEDPQTHSNRIYRMIKLGLGIDEDEVAAEEPNAAVPDEIPPLEGDEDASRMEEVD

SEQ ID NO: 1359 - protein, 586 aa, Homo Sapiens
MATATPVPPRMGSRAGGPTTPLSPTRLSRLQEKEELRELNDRLAVYIDKVRSLETENSALQLQVTEREEVRGRELTGLKALYETELADARRALDDTARERAKLQIELGKCKAEHDQLLLNYAKKESDLNGAQIKLREYEAALNSKDAALATALGDKKSLEGDLEDLKDQIAQLEASLAAAKKQLADETLLKVDLENRCQSLTEDLEFRKSMYEEEINETRRKHETRLVEVDSGRQIEYEYKLAQALHEMREQHDAQVRLYKEELEQTYHAKLENARLSSEMNTSTVNSAREELMESRMRIESLSSQLSNLQKESRACLERIQELEDLLAKEKDNSRRMLTDKEREMAEIRDQMQQQLNDYEQLLDVKLALDMEISAYRKLLEGEEERLKLSPSPSSRVTVSRASSSRSVRTTRGKRKRVDVEESEASSSVSISHSASATGNVCIEEIDVDGKFIRLKNTSEQDQPMGGWEMIRKIGDTSVSYKYTSRYVLKAGQTVTIWAANAGVTASPPTDLIWKNQNSWGTGEDVKVILKNSQGEEVAQRSTVFKTTIPEEEEEEEEAAGVVVEEELFHQQGTPRASNRSCAIM

SEQ ID NO: 1360 - protein, 628 aa, Homo Sapiens
MEPPDAPAQARGAPRLLLLAVLLAAHPDAQAEVRLSVPPLVEVMRGKSVILDCTPTGTHDHYMLEWFLTDRSGARPRLASAEMQGSELQVTMHDTRGRSPPYQLDSQGRLVLAEAQVGDERDYVCVVRAGAAGTAEATARLNVFAKPEATEVSPNKGTLSVMEDSAQEIATCNSRNGNPAPKITWYRNGQRLEVPVEMNPEGYMTSRTVREASGLLSLTSTLYLRLRKDDRDASFHCAAHYSLPEGRHGRLDSPTFHLTLHYPTEHVQFWVGSPSTPAGWVREGDTVQLLCRGDGSPSPEYTLFRLQDEQEEVLNVNLEGNLTLEGVTRGQSGTYGCRVEDYDAADDVQLSKTLELRVAYLDPLELSEGKVLSLPLNSSAVVNCSVHGLPTPALRWTKDSTPLGDGPMLSLSSITFDSNGTYVCEASLPTVPVLSRTQNFTLLVQGSPELKTAEIEPKADGSWREGDEVTLICSARGHPDPKLSWSQLGGSPAEPIPGRQGWVSSSLTLKVTSALSRDGISCEASNPHGNKRHVFHFGTVSPQTSQAGVAVMAVAVSVGLLLLVVAVFYCVRRKGGPCCRQRREKGAPPPGEPGLSHSGSEQPEQTGLLMGGASGGARGGSGGFGDEC

SEQ ID NO: 1361 - protein, 508 aa, Homo Sapiens
MLRRALLCLAVAALVRADAPEEEDHVLVLRKSNFAEALAAHKYLLVEFYAPWCGHCKALAPEYAKAAGKLKAEGSEIRLAKVDATEESDLAQQYGVRGYPTIKFFRNGDTASPKEYTAGREADDIVNWLKKRTGPAATTLPDGAAAESLVESSEVAVIGFFKDVESDSAKQFLQAAEAIDDIPFGITSNSDVFSKYQLDKDGVVLFKKFDEGRNNFEGEVTKENLLDFIKHNQLPLVIEFTEQTAPKIFGGEIKTHILLFLPKSVSDYDGKLSNFKTAAESFKGKILFIFIDSDHTDNQRILEFFGLKKEECPAVRLITLEEEMTKYKPESEELTAERITEFCHRFLEGKIKPHLMSQELPEDWDKQPVKVLVGKNFEDVAFDEKKNVFVEFYAPWCGHCKQLAPIWDKLGETYKDHENIVIAKMDSTANEVEAVKVHSFPTLKFFPASADRTVIDYNGERTLDGFKKFLESGGQDGAGDDDDLEDLEEAEEPDMEEDDDQKAVKDEL

SEQ ID NO: 1362 - protein, 677 aa, Homo Sapiens
MESDLHQIIHSSQPLTLEHVRYFLYQLLRGLKYMHSAQVIHRDLKPSNLLVNENCELKIGDFGMARGLCTSPAEHQYFMTEYVATRWYRAPELMLSLHEYTQAIDLWSVGCIFGEMLARRQLFPGKNYVHQLQLIMMVLGTPSPAVIQAVGAERVRAYIQSLPPRQPVPWETVYPGADRQALSLLGRMLRFEPSARISAAAALRHPFLAKYHDPDDEPDCAPPFDFAFDREALTRERIKEAIVAEIEDFHARREGIRQQIRFQPSLQPVASEPGCPDVEMPSPWAPSGDCAMESPPPAPPPCPGPAPDTIDLTLQPPPPVSEPAPPKKDGAISDNTKAALKAALLKSLRSRLRDGPSAPLEAPEPRKPVTAQERQREREEKRRRRQERAKEREKRRQERERKERGAGASGGPSTDPLAGLVLSDNDRSLLERWTRMARPAAPALTSVPAPAPAPTPTPTPVQPTSPPPGPVAQPTGPQPQSAGSTSGPVPQPACPPPGPAPHPTGPPGPIPVPAPPQIATSTSLLAAQSLVPPPGLPGSSTPGVLPYFPPGLPPPDAGGAPQSSMSESPDVNLVTQQLSKSQVEDPLPPVFSGTPKGSGAGYGVGFDLEEFLNQSFDMGVADGPQDGQADSASLSASLLADWLEGHGMNPADIESLQREIQMDSPMLLADLPDLQDP

SEQ ID NO: 1363 - protein, 698 aa, Homo Sapiens
MRLAVGALLVCAVLGLCLAVPDKTVRWCAVSEHEATKCQSFRDHMKSVIPSDGPSVACVKKASYLDCIRAIAANEADAVTLDAGLVYDAYLAPNNLKPVVAEFYGSKEDPQTFYYAVAVVKKDSGFQMNQLRGKKSCHTGLGRSAGWNIPIGLLYCDLPEPRKPLEKAVANFFSGSCAPCADGTDFPQLCQLCPGCGCSTLNQYFGYSGAFKCLKDGAGDVAFVKHSTIFENLANKADRDQYELLCLDNTRKPVDEYKDCHLAQVPSHTVVARSMGGKEDLIWELLNQAQEHFGKDKSKEFQLFSSPHGKDLLFKDSAHGFLKVPPRMDAKMYLGYEYVTAIRNLREGTCPEAPTDECKPVKWCALSHHERLKCDEWSVNSVGKIECVSAETTEDCIAKIMNGEADAMSLDGGFVYIAGKCGLVPVLAENYNKSDNCEDTPEAGYFAVAVVKKSASDLTWDNLKGKKSCHTAVGRTAGWNIPMGLLYNKINHCRFDEFFSEGCAPGSKKDSSLCKLCMGSGLNLCEPNNKEGYYGYTGAFRCLVEKGDVAFVKHQTVPQNTGGKNPDPWAKNLNEKDYELLCLDGTRKPVEEYANCHLARAPNHAVVTRKDKEACVHKILRQQQHLFGSNVTDCSGNFCLFRSETKDLLFRDDTVCLAKLHDRNTYEKYLGEEYVKAVGNLRKCSTSSLLEACTFRRP

SEQ ID NO: 1364 - protein, 1274 aa, Homo Sapiens
MASGSGDSVTRRSVASQFFTQEEGPGIDGMTTSERVVDLLNQAALITNDSKITVLKQVQELIINKDPTLLDNFLDEIIAFQADKSIEVRKFVIGFIEEACKRDIELLLKLIANLNMLLRDENVNVVKKAILTMTQLYKVALQWMVKSRVISELQEACWDMVSAMAGDIILLLDSDNDGIRTHAIKFVEGLIVTLSPRMADSEIPRRQEHDISLDRIPRDHPYIQYNVLWEEGKAALEQLLKFMVHPAISSINLTTALGSLANIARQRPMFMSEVIQAYETLHANLPPTLAKSQVSSVRKNLKLHLLSVLKHPASLEFQAQITTLLVDLGTPQAEIARNMPSSKDTRKRPRDDSDSTLKKMKLEPNLGEDDEDKDLEPGPSGTSKASAQISGQSDTDITAEFLQPLLTPDNVANLVLISMVYLPEAMPASFQAIYTPVESAGTEAQIKHLARLMATQMTAAGLGPGVEQTKQCKEEPKEEKVVKTESVLIKRRLSAQGQAISVVGSLSSMSPLEEEAPQAKRRPEPIIPVTQPRLAGAGGRKKIFRLSDVLKPLTDAQVEAMKLGAVKRILRAEKAVACSGAAQVRIKILASLVTQFNSGLKAEVLSFILEDVRARLDLAFAWLYQEYNAYLAAGASGSLDKYEDCLIRLLSGLQEKPDQKDGIFTKVVLEAPLITESALEVVRKYCEDESRTYLGMSTLRDLIFKRPSRQFQYLHVLLDLSSHEKDKVRSQALLFIKRMYEKEQLREYVEKFALNYLQLLVHPNPPSVLFGADKDTEVAAPWTEETVKQCLYLYLALLPQNHKLIHELAAVYTEAIADIKRTVLRVIEQPIRGMGMNSPELLLLVENCPKGAETLVTRCLHSLTDKVPPSPELVKRVRDLYHKRLPDVRFLIPVLNGLEKKEVIQALPKLIKLNPIVVKEVFNRLLGTQHGEGNSALSPLNPGELLIALHNIDSVKCDMKSIIKATNLCFAERNVYTSEVLAVVMQQLMEQSPLPMLLMRTVIQSLTMYPRLGGFVMNILSRLIMKQVWKYPKVWEGFIKCCQRTKPQSFQVILQLPPQQLGAVFDKCPELREPLLAHVRSFTPHQQAHIPNSIMTILEASGKQEPEAKEAPAGPLEEDDLEPLTLAPAPAPRPPQDLIGLRLAQEKALKRQLEEEQKLKPGGVGAPSSSSPSPSPSARPGPPPSEEAMDFREEGPECETPGIFISMDDDSGLTEAALLDSSLEGPLPKETAAGGLTLKEERSPQTLAPVGEDAMKTPSPAAEDAREPEAKGNS

SEQ ID NO: 1365 - protein, 958 aa, Homo Sapiens
MKEAKDARYTNGHLFTTISVSGMTMCYACNKSITAKEALICPTCNVTIHNRCKDTLANCTKVKQKQQKAALLKNNTALQSVSLRSKTTIRERPSSAIYPSDSFRQSLLGSRRGRSSLSLAKSVSTTNIAGHFNDESPLGLRRILSQSTDSLNMRNRTLSVESLIDEEVIYSELMSDFEMDEKDFAADSWSLAVDSSFLQQHKKEVMKQQDVIYELIQTELHHVRTLKIMTRLFRTGMLEELHLEPGVVQGLFPCVDELSDIHTRFLSQLLERRRQALCPGSTRNFVIHRLGDLLISQFSGPSAEQMCKTYSEFCSRHSKALKLYKELYARDKRFQQFIRKVTRPAVLKRHGVQECILLVTQRITKYPLLISRILQHSHGIEEERQDLTTALGLVKELLSNVDEGIYQLEKGARLQEIYNRMDPRAQTPVPGKGPFGREELLRRKLIHDGCLLWKTATGRFKDVLVLLMTDVLVFLQEKDQKYIFPTLDKPSVVSLQNLIVRDIANQEKGMFLISAAPPEMYEVHTASRDDRSTWIRVIQQSVRTCPSREDFPLIETEDEAYLRRIKMELQQKDRALVELLREKVGLFAEMTHFQAEEDGGSGMALPTLPRGLFRSESLESPRGERLLQDAIREVEGLKDLLVGPGVELLLTPREPALPLEPDSGGNTSPGVTANGEARTFNGSIELCRADSDSSQRDRNGNQLRSPQEEALQRLVNLYGLLHGLQAAVAQQDTLMEARFPEGPERREKLCRANSRDGEAGRAGAAPVAPEKQATELALLQRQHALLQEELRRCRRLGEERATEAGSLEARLRESEQARALLEREAEEARRQLAALGQTEPLPAEAPWARRPVDPRRRSLPAGDALYLSFNPPQPSRGTDRLDLPVTTRSVHRNFEDRERQELGSPEERLQDSSDPDTGSEEEGSSRLSPPHSPRDFTRMQDIPEETESRDGEAVASES

SEQ ID NO: 1366 - protein, 357 aa, Homo Sapiens
MIEQQKRKGPELPLVPVKRQRHELLLGAGSGPGAGQQQATPGALLQAGPPRCSSLQAPIMLLSGHEGEVYCCKFHPNGSTLASAGFDRLILLWNVYGDCDNYATLKGHSGAVMELHYNTDGSMLFSASTDKTVAVWDSETGERVKRLKGHTSFVNSCYPARRGPQLVCTGSDDGTVKLWDIRKKAAIQTFQNTYQVLAVTFNDTSDQIISGGIDNDIKVWDLRQNKLTYTMRGHADSVTGLSLSSEGSYLLSNAMDNTVRVWDVRPFAPKERCVKIFQGNVHNFEKNLLRCSWSPDGSKIAAGSADRFVYVWDTTSRRILYKLPGHAGSINEVAFHPDEPIIISASSDKRLYMGEIQ

SEQ ID NO: 1367 - protein, 1496 aa, Homo Sapiens
MAEERPPRLVDYFVVAGLAGNGAPIPEETWVPEPSGPLRPPRPAEPITDVAVIARALGEEVPQGYTCIQASAGGHPLELSAGLLGGTQPVICYRRGRDKPPLVELGVLYEGKERPKPGFQVLDTTPYSHSANLAPPGPGHPRTYLTYRRAAEGAGLHALGITDLCLVLPSKGEGTPHTYCRLPRNLNPGMWGPAVYLCYKVGLAKANTLVYEAELLGRYPEEDNEAFPLPESVPVFCLPMGATIECWPAQTKYPVPVFSTFVLTGAAGDKVYGAALQFYEAFPRARLSERQARALGLLSAVERGRALGGRAVRSRRAIAVLSRWPAFPAFRAFLTFLYRYSVSGPHRLPLEAHISHFIHNVPFPSPQRPRILVQMSPYDNLLLCQPVSSPLPLSGASFLQLLQSLGPELAITLLLAVLTEHKLLVHSLRPDLLTSVCEALVSMIFPLHWQCPYIPLCPLVLADVLSAPVPFIVGIHSSYFDLHDPPADVICVDLDTNTLFQTEEKKLLSPRTLPRRPYKVLLATLTNLYQQLDQTYTGPEEEASLEFLLTDYEAVCGRRARLEREVQGAFLRFMACLLKGYRVFLRPLTQAPSEGARDVDNLFFLQGFLKSRERSSHKLYSQLLHTQMFSQFIEECSFGSARHAALEFFDSCVEKVHPEQEKPEPTPLVELEELSGSELTVFITPPEEPALPEGSESTPQYCYDGFPELRAELFESLQEQPGALPVPGPSRSAPSSPAPRRTKQEMKVAQRMAQKSAAVPELWARCLLGHCYGLWFLCLPAYVRSAPSRVQALHTAYHVLRQMESGKVVLPDEVCYRVLMQLCSHYGQPVLSVRVMLEMRQAGIVPNTITYGYYNKAVLESKWPSGTPGGRLRWAKLRNVVLGAAQFRQPLRERQQQQQQQQQQQQQQQQEQVSAHQEAGSSQAEPYLERPSPTRPLQRQTTWAGRSLRDPASPPGRLVKSGSLGSARGAQPTVEAGVAHMIEALGVLEPRGSPVPWHDGSLSDLSLTGEEPLPGGSPGGSGSALSAQSTEALEGLSGRGPKAGGRQDEAGTPRRGLGARLQQLLTPSRHSPASRIPPPELPPDLPPPARRSPMDSLLHPRERPGSTASESSASLGSEWDLSESSLSNLSLRRSSERLSDTPGSFQSPSLEILLSSCSLCRACDSLVYDEEIMAGWAPDDSNLNTTCPFCACPFVPLLSVQTLDSRPSVPSPKSAGASGSKDAPVPGGPGPVLSDRRLCLALDEPQLCNGHMGGASRRVESGAWAYLSPLVLRKELESLVENEGSEVLALPELPSAHPIIFWNLLWYFQRLRLPSILPGLVLASCDGPSHSQAPSPWLTPDPASVQVRLLWDVLTPDPNSCPPLYVLWRVHSQIPQRVVWPGPVPASLSLALLESVLRHVGLNEVHKAVGLLLETLGPPPTGLHLQRGIYREILFLTMAALGKDHVDIVAFDKKYKSAFNKLASSMGKEELRHRRAQMPTPKAIDCRKCFGAPPEC

SEQ ID NO: 1368 - protein, 521 aa, Homo Sapiens
MSLSRSEEMHRLTENVYKTIMEQFNPSLRNFIAMGKNYEKALAGVTYAAKGYFDALVKMGELASESQGSKELGDVLFQMAEVHRQIQNQLEEMLKSFHNELLTQLEQKVELDSRYLSAALKKYQTEQRSKGDALDKCQAELKKLRKKSQGSKNPQKYSDKELQYIDAISNKQGELENYVSDGYKTALTEERRRFCFLVEKQCAVAKNSAAYHSKGKELLAQKLPLWQQACADPSKIPERAVQLMQQVASNGATLPSALSASKSNLVISDPIPGAKPLPVPPELAPFVGRMSAQESTPIMNGVTGPDGEDYSPWADRKAAQPKSLSPPQSQSKLSDSYSNTLPVRKSVTPKNSYATTENKTLPRSSSMAAGLERNGRMRVKAIFSHAAGDNSTLLSFKEGDLITLLVPEARDGWHYGESEKTKMRGWFPFSYTRVLDSDGSDRLHMSLQQGKSSSTGNLLDKDDLAIPPPDYGAASRAFPAQTASGFKQRPYSVAVPAFSQGLDDYGARSMSSGSGTLVSTV

SEQ ID NO: 1369 - protein, 539 aa, Homo Sapiens
MPENVAPRSGATAGAAGGRGKGAYQDRDKPAQIRFSNISAAKAVADAIRTSLGPKGMDKMIQDGKGDVTITNDGATILKQMQVLHPAARMLVELSKAQDIEAGDGTTSVVIIAGSLLDSCTKLLQKGIHPTIISESFQKALEKGIEILTDMSRPVELSDRETLLNSATTSLNSKVVSQYSSLLSPMSVNAVMKVIDPATATSVDLRDIKIVKKLGGTIDDCELVEGLVLTQKVSNSGITRVEKAKIGLIQFCLSAPKTDMDNQIVVSDYAQMDRVLREERAYILNLVKQIKKTGCNVLLIQKSILRDALSDLALHFLNKMKIMVIKDIEREDIEFICKTIGTKPVAHIDQFTADMLGSAELAEEVNLNGSGKLLKITGCASPGKTVTIVVRGSNKLVIEEAERSIHDALCVIRCLVKKRALIAGGGAPEIELALRLTEYSRTLSGMESYCVRAFADAMEVIPSTLAENAGLNPISTVTELRNRHAQGEKTAGINVRKGGISNILEELVVQPLLVSVSALTLATETVRSILKIDDVVNTR

SEQ ID NO: 1370 - protein, 797 aa, Homo Sapiens
MAHRCLRLWGRGGCWPRGLQQLLVPGGVGPGEQPCLRTLYRFVTTQARASRNSLLTDIIAAYQRFCSRPPKGFEKYFPNGKNGKKASEPKEVMGEKKESKPAATTRSSGGGGGGGGKRGGKKDDSHWWSRFQKGDIPWDDKDFRMFFLWTALFWGGVMFYLLLKRSGREITWKDFVNNYLSKGVVDRLEVVNKRFVRVTFTPGKTPVDGQYVWFNIGSVDTFERNLETLQQELGIEGENRVPVVYIAESDGSFLLSMLPTVLIIAFLLYTIRRGPAGIGRTGRGMGGLFSVGETTAKVLKDEIDVKFKDVAGCEEAKLEIMEFVNFLKNPKQYQDLGAKIPKGAILTGPPGTGKTLLAKATAGEANVPFITVSGSEFLEMFVGVGPARVRDLFALARKNAPCILFIDEIDAVGRKRGRGNFGGQSEQENTLNQLLVEMDGFNTTTNVVILAGTNRPDILDPALLRPGRFDRQIFIGPPDIKGRASIFKVHLRPLKLDSTLEKDKLARKLASLTPGFSGADVANVCNEAALIAARHLSDSINQKHFEQAIERVIGGLEKKTQVLQPEEKKTVAYHEAGHAVAGWYLEHADPLLKVSIIPRGKGLGYAQYLPKEQYLYTKEQLLDRMCMTLGGRVSEEIFFGRITTGAQDDLRKVTQSAYAQIVQFGMNEKVGQISFDLPRQGDMVLEKPYSEATARLIDDEVRILINDAYKRTVALLTEKKADVEKVALLLLEKEVLDKNDMVELLGPRPFAEKSTYEEFVEGTGSLDEDTSLPEGLKDWNKEREKEKEEPPGEKVAN

SEQ ID NO: 1371 - protein, 725 aa, Homo Sapiens
MAMDSSLQARLFPGLAIKIQRSNGLIHSANVRTVNLEKSCVSVEWAEGGATKGKEIDFDDVAAINPELLQLLPLHPKDNLPLQENVTIQKQKRRSVNSKIPAPKESLRSRSTRMSTVSELRITAQENDMEVELPAAANSRKQFSVPPAPTRPSCPAVAEIPLRMVSEEMEEQVHSIRGSSSANPVNSVRRKSCLVKEVEKMKNKREEKKAQNSEMRMKRAQEYDSSFPNWEFARMIKEFRATLECHPLTMTDPIEEHRICVCVRKRPLNKQELAKKEIDVISIPSKCLLLVHEPKLKVDLTKYLENQAFCFDFAFDETASNEVVYRFTARPLVQTIFEGGKATCFAYGQTGSGKTHTMGGDLSGKAQNASKGIYAMASRDVFLLKNQPCYRKLGLEVYVTFFEIYNGKLFDLLNKKAKLRVLEDGKQQVQVVGLQEHLVNSADDVIKMIDMGSACRTSGQTFANSNSSRSHACFQIILRAKGRMHGKFSLVDLAGNERGADTSSADRQTRMEGAEINKSLLALKECIRALGQNKAHTPFRESKLTQVLRDSFIGENSRTCMIATISPGISSCEYTLNTLRYADRVKELSPHSGPSGEQLIQMETEEMEACSNGALIPGNLSKEEEELSSQMSSFNEAMTQIRELEEKAMEELKEIIQQGPDWLELSEMTEQPDYDLETFVNKAESALAQQAKHFSALRDVIKALRLAMQLEEQASRQISSKKRPQ

SEQ ID NO: 1372 - protein, 290 aa, Homo Sapiens
MSLKLQASNVTNKNDPKSINSRVFIGNLNTALVKKSDVETIFSKYGRVAGCSVHKGYAFVQYSNERHARAAVLGENGRVLAGQTLDINMAGEPKPDRPKGLKRAASAIYRLFDYRGRLSPVPVPRAVPVKRPRVTVPLVRRVKTNVPVKLFARSTAVTTSSAKIKLKSSELQAIKTELTQIKSNIDALLSRLEQIAAEQKANPDGKKKGDGGGAGGGGGGGGSGGGGSGGGGGGGSSRPPAPQENTTSEAGLPQGEARTRDDGDEEGLLTHSEEELEHSQDTDADDGALQ

SEQ ID NO: 1373 - protein, 525 aa, Homo Sapiens
MVSRPEPEGEAMDAELAVAPPGCSHLGSFKVDNWKQNLRAIYQCFVWSGTAEARKRKAKSCICHVCGVHLNRLHSCLYCVFFGCFTKKHIHEHAKAKRHNLAIDLMYGGIYCFLCQDYIYDKDMEIIAKEEQRKAWKMQGVGEKFSTWEPTKRELELLKHNPKRRKITSNCTIGLRGLINLGNTCFMNCIVQALTHTPLLRDFFLSDRHRCEMQSPSSCLVCEMSSLFQEFYSGHRSPHIPYKLLHLVWTHARHLAGYEQQDAHEFLIAALDVLHRHCKGDDNGKKANNPNHCNCIIDQIFTGGLQSDVTCQVCHGVSTTIDPFWDISLDLPGSSTPFWPLSPGSEGNVVNGESHVSGTTTLTDCLRRFTRPEHLGSSAKIKCSGCHSYQESTKQLTMKKLPIVACFHLKRFEHSAKLRRKITTYVSFPLELDMTPFMASSKESRMNGQYQQPTDSLNNDNKYSLFAVVNHQGTLESGHYTSFIRQHKDQWFKCDDAIITKASIKDVLDSEGYLLFYHKQFLEYE

SEQ ID NO: 1374 - protein, 5183 aa, Homo Sapiens
MATSGGEEAAAAAPAPGTPATGADTTPGWEVAVRPLLSASYSAFEMKELPQLVASVIESESEILHHEKQYEPFYSSFVALSTHYITTVCSLIPRNQLQSVAAACKVLIEFSLLRLENPDEACAVSQKHLILLIKGLCTGCSRLDRTEIITFTAMMKSAKLPQTVKTLSDVEDQKELASPVSPELRQKEVQMNFLNQLTSVFNPRTVASQPISTQTLVEGENDEQSSTDQASAIKTKNVFIAQNVASLQELGGSEKLLRVCLNLPYFLRYINRFQDAVLANSFFIMPATVADATAVRNGFHSLVIDVTMALDTLSLPVLEPLNPSRLQDVTVLSLSCLYAGVSVATCMAILHVGSAQQVRTGSTSSKEDDYESDAATIVQKCLEIYDMIGQAISSSRRAGGEHYQNFQLLGAWCLLNSLFLILNLSPTALADKGKEKDPLAALRVRDILSRTKEGVGSPKLGPGKGHQGFGVLSVILANHAIKLLTSLFQDLQVEALHKGWETDGPPAALSIMAQSTSIQRIQRLIDSVPLMNLLLTLLSTSYRKACVLQRQRKGSMSSDASASTDSNTYYEDDFSSTEEDSSQDDDSEPILGQWFEETISPSKEKAAPPPPPPPPPLESSPRVKSPSKQAPGEKGNILASRKDPELFLGLASNILNFITSSMLNSRNNFIRNYLSVSLSEHHMATLASIIKEVDKDGLKGSSDEEFAAALYHFNHSLVTSDLQSPNLQNTLLQQLGVAPFSEGPWPLYIHPQSLSVLSRLLLIWQHKASAQGDPDVPECLKVWDRFLSTMKQNALQGVVPSETEDLNVEHLQMLLLIFHNFTETGRRAILSLFVQIIQELSVNMDAQMRFVPLILARLLLIFDYLLHQYSKAPVYLFEQVQHNLLSPPFGWASGSQDSNSRRATTPLYHGFKEVEENWSKHFSSDAVPHPRFYCVLSPEASEDDLNRLDSVACDVLFSKLVKYDELYAALTALLAAGSQLDTVRRKENKNVTALEACALQYYFLILWRILGILPPSKTYINQLSMNSPEMSECDILHTLRWSSRLRISSYVNWIKDHLIKQGMKAEHASSLLELASTTKCSSVKYDVEIVEEYFARQISSFCSIDCTTILQLHEIPSLQSIYTLDAAISKVQVSLDEHFSKMAAETDPHKSSEITKNLLPATLQLIDTYASFTRAYLLQNFNEEGTTEKPSKEKLQGFAAVLAIGSSRCKANTLGPTLVQNLPSSVQTVCESWNNINTNEFPNIGSWRNAFANDTIPSESYISAVQAAHLGTLCSQSLPLAASLKHTLLSLVRLTGDLIVWSDEMNPPQVIRTLLPLLLESSTESVAEISSNSLERILGPAESDEFLARVYEKLITGCYNILANHADPNSGLDESILEECLQYLEKQLESSQARKAMEEFFSDSGELVQIMMATANENLSAKFCNRVLKFFTKLFQLTEKSPNPSLLHLCGSLAQLACVEPVRLQAWLTRMTTSPPKDSDQLDVIQENRQLLQLLTTYIVRENSQVGEGVCAVLLGTLTPMATEMLANGDGTGFPELMVVMATLASAGQGAGHLQLHNAAVDWLSRCKKYLSQKNVVEKLNANVMHGKHVMILECTCHIMSYLADVTNALSQSNGQGPSHLSVDGEERAIEVDSDWVEELAVEEEDSQAEDSDEDSLCNKLCTFTITQKEFMNQHWYHCHTCKMVDGVGVCTVCAKVCHKDHEISYAKYGSFFCDCGAKEDGSCLALVKRTPSSGMSSTMKESAFQSEPRISESLVRHASTSSPADKAKVTISDGKVADEEKPKKSSLCRTVEGCREELQNQANFSFAPLVLDMLNFLMDAIQTNFQQASAVGSSSRAQQALSELHTVEKAVEMTDQLMVPTLGSQEGAFENVRMNYSGDQGQTIRQLISAHVLRRVAMCVLSSPHGRRQHLAVSHEKGKITVLQLSALLKQADSSKRKLTLTRLASAPVPFTVLSLTGNPCKEDYLAVCGLKDCHVLTFSSSGSVSDHLVLHPQLATGNFIIKAVWLPGSQTELAIVTADFVKIYDLCVDALSPTFYFLLPSSKIRDVTFLFNEEGKNIIVIMSSAGYIYTQLMEEASSAQQGPFYVTNVLEINHEDLKDSNSQVAGGGVSVYYSHVLQMLFFSYCQGKSFAATISRTTLEVLQLFPINIKSSNGGSKTSPALCQWSEVMNHPGLVCCVQQTTGVPLVVMVKPDTFLIQEIKTLPAKAKIQDMVAIRHTACNEQQRTTMILLCEDGSLRIYMANVENTSYWLQPSLQPSSVISIMKPVRKRKTATITTRTSSQVTFPIDFFEHNQQLTDVEFGGNDLLQVYNAQQIKHRLNSTGMYVANTKPGGFTIEISNNNSTMVMTGMRIQIGTQAIERAPSYIEIFGRTMQLNLSRSRWFDFPFTREEALQADKKLNLFIGASVDPAGVTMIDAVKIYGKTKEQFGWPDEPPEEFPSASVSNICPSNLNQSNGTGDSDSAAPTTTSGTVLERLVVSSLEALESCFAVGPIIEKERNKNAAQELATLLLSLPAPASVQQQSKSLLASLHTSRSAYHSHKDQALLSKAVQCLNTSSKEGKDLDPEVFQRLVITARSIAIMRPNNLVHFTESKLPQMETEGMDEGKEPQKQLEGDCCSFITQLVNHFWKLHASKPKNAFLAPACLPGLTHIEATVNALVDIIHGYCTCELDCINTASKIYMQMLLCPDPAVSFSCKQALIRVLRPRNKRRHVTLPSSPRSNTPMGDKDDDDDDDADEKMQSSGIPNGGHIRQESQEQSEVDHGDFEMVSESMVLETAENVNNGNPSPLEALLAGAEGFPPMLDIPPDADDETMVELAIALSLQQDQQGSSSSALGLQSLGLSGQAPSSSSLDAGTLSDTTASAPASDDEGSTAATDGSTLRTSPADHGGSVGSESGGSAVDSVAGEHSVSGRSSAYGDATAEGHPAGPGSVSSSTGAISTTTGHQEGDGSEGEGEGETEGDVHTSNRLHMVRLMLLERLLQTLPQLRNVGGVRAIPYMQVILMLTTDLDGEDEKDKGALDNLLSQLIAELGMDKKDVSKKNERSALNEVHLVVMRLLSVFMSRTKSGSKSSICESSSLISSATAAALLSSGAVDYCLHVLKSLLEYWKSQQNDEEPVATSQLLKPHTTSSPPDMSPFFLRQYVKGHAADVFEAYTQLLTEMVLRLPYQIKKITDTNSRIPPPVFDHSWFYFLSEYLMIQQTPFVRRQVRKLLLFICGSKEKYRQLRDLHTLDSHVRGIKKLLEEQGIFLRASVVTASSGSALQYDTLISLMEHLKACAEIAAQRTINWQKFCIKDDSVLYFLLQVSFLVDEGVSPVLLQLLSCALCGSKVLAALAASSGSSSASSSSAPVAASSGQATTQSKSSTKKSKKEEKEKEKDGETSGSQEDQLCTALVNQLNKFADKETLIQFLRCFLLESNSSSVRWQAHCLTLHIYRNSSKSQQELLLDLMWSIWPELPAYGRKAAQFVDLLGYFSLKTPQTEKKLKEYSQKAVEILRTQNHILTNHPNSNIYNTLSGLVEFDGYYLESDPCLVCNNPEVPFCYIKLSSIKVDTRYTTTQQVVKLIGSHTISKVTVKIGDLKRTKMVRTINLYYNNRTVQAIVELKNKPARWHKAKKVQLTPGQTEVKIDLPLPIVASNLMIEFADFYENYQASTETLQCPRCSASVPANPGVCGNCGENVYQCHKCRSINYDEKDPFLCNACGFCKYARFDFMLYAKPCCAVDPIENEEDRKKAVSNINTLLDKADRVYHQLMGHRPQLENLLCKVNEAAPEKPQDDSGTAGGISSTSASVNRYILQLAQEYCGDCKNSFDELSKIIQKVFASRKELLEYDLQQREAATKSSRTSVQPTFTASQYRALSVLGCGHTSSTKCYGCASAVTEHCITLLRALATNPALRHILVSQGLIRELFDYNLRRGAAAMREEVRQLMCLLTRDNPEATQQMNDLIIGKVSTALKGHWANPDLASSLQYEMLLLTDSISKEDSCWELRLRCALSLFLMAVNIKTPVVVENITLMCLRILQKLIKPPAPTSKKNKDVPVEALTTVKPYCNEIHAQAQLWLKRDPKASYDAWKKCLPIRGIDGNGKAPSKSELRHLYLTEKYVWRWKQFLSRRGKRTSPLDLKLGHNNWLRQVLFTPATQAARQAACTIVEALATIPSRKQQVLDLLTSYLDELSIAGECAAEYLALYQKLITSAHWKVYLAARGVLPYVGNLITKEIARLLALEEATLSTDLQQGYALKSLTGLLSSFVEVESIKRHFKSRLVGTVLNGYLCLRKLVVQRTKLIDETQDMLLEMLEDMTTGTESETKAFMAVCIETAKRYNLDDYRTPVFIFERLCSIIYPEENEVTEFFVTLEKDPQQEDFLQGRMPGNPYSSNEPGIGPLMRDIKNKICQDCDLVALLEDDSGMELLVNNKIISLDLPVAEVYKKVWCTTNEGEPMRIVYRMRGLLGDATEEFIESLDSTTDEEEDEEEVYKMAGVMAQCGGLECMLNRLAGIRDFKQGRHLLTVLLKLFSYCVKVKVNRQQLVKLEMNTLNVMLGTLNLALVAEQESKDSGGAAVAEQVLSIMEIILDESNAEPLSEDKGNLLLTGDKDQLVMLLDQINSTFVRSNPSVLQGLLRIIPYLSFGEVEKMQILVERFKPYCNFDKYDEDHSGDDKVFLDCFCKIAAGIKNNSNGHQLKDLILQKGITQNALDYMKKHIPSAKNLDADIWKKFLSRPALPFILRLLRGLAIQHPGTQVLIGTDSIPNLHKLEQVSSDEGIGTLAENLLEALREHPDVNKKIDAARRETRAEKKRMAMAMRQKALGTLGMTTNEKGQVVTKTALLKQMEELIEEPGLTCCICREGYKFQPTKVLGIYTFTKRVALEEMENKPRKQQGYSTVSHFNIVHYDCHLAAVRLARGREEWESAALQNANTKCNGLLPVWGPHVPESAFATCLARHNTYLQECTGQREPTYQLNIHDIKLLFLRFAMEQSFSADTGGGGRESNIHLIPYIIHTVLYVLNTTRATSREEKNLQGFLEQPKEKWVESAFEVDGPYYFTVLALHILPPEQWRATRVEILRRLLVTSQARAVAPGGATRLTDKAVKDYSAYRSSLLFWALVDLIYNMFKKVPTSNTEGGWSCSLAEYIRHNDMPIYEAADKALKTFQEEFMPVETFSEFLDVAGLLSEITDPESFLKDLLNSVP

SEQ ID NO: 1375 - protein, 354 aa, Homo Sapiens
MATPLVAGPAALRFAAAASWQVVRGRCVEHFPRVLEFLRSLRAVAPGLVRYRHHERLCMGLKAKVVVELILQGRPWAQVLKALNHHFPESGPIVRDPKATKQDLRKILEAQETFYQQVKQLSEAPVDLASKLQELEQEYGEPFLAAMEKLLFEYLCQLEKALPTPQAQQLQDVLSWMQPGVSITSSLAWRQYGVDMGWLLPECSVTDSVNLAEPMEQNPPQQQRLALHNPLPKAKPGTHLPQGPSSRTHPEPLAGRHFNLAPLGRRRVQSQWASTRGGHKERPTVMLFPFRNLGSPTQVISKPESKEEHAIYTADLAMGTRAASTGKSKSPCQTLGGRALKENPVDLPATEQKE

SEQ ID NO: 1376 - protein, 456 aa, Homo Sapiens
MKCEHCTRKECSKKTKTDDQENVSADAPSPAQENGEKGEFHKLADAKIFLSDCLACDSCMTAEEGVQLSQQNAKDFFRVLNLNKKCDTSKHKVLVVSVCPQSLPYFAAKFNLSVTDASRRLCGFLKSLGVHYVFDTTIAADFSILESQKEFVRRYRQHSEEERTLPMLTSACPGWVRYAERVLGRPITAHLCTAKSPQQVMGSLVKDYFARQQNLSPEKIFHVIVAPCYDKKLEALQESLPPALHGSRGADCVLTSGEIAQIMEQGDLSVRDAAVDTLFGDLKEDKVTRHDGASSDGHLAHIFRHAAKELFNEDVEEVTYRALRNKDFQEVTLEKNGEVVLRFAAAYGFRNIQNMILKLKKGKFPFHFVEVLACAGGCLNGRGQAQTPDGHADKALLRQMEGIYADIPVRRPESSAHVQELYQEWLEGINSPKAREVLHTTYQSQERGTHSLDIKW

SEQ ID NO: 1377 - protein, 418 aa, Homo Sapiens
MATSEQSICQARASVMVYDDTSKKWVPIKPGQQGFSRINIYHNTASNTFRVVGVKLQDQQVVINYSIVKGLKYNQATPTFHQWRDARQVYGLNFASKEEATTFSNAMLFALNIMNSQEGGPSSQRQVQNGPSPDEMDIQRRQVMEQHQQQRQESLERRTSATGPILPPGHPSSAASAPVSCSGPPPPPPPPVPPPPTGATPPPPPPLPAGGAQGSSHDESSMSGLAAAIAGAKLRRVQRPEDASGGSSPSGTSKSDANRASSGGGGGGLMEEMNKLLAKRRKAASQSDKPAEKKEDESQMEDPSTSPSPGTRAASQPPNSSEAGRKPWERSNSVEKPVSSILSRTPSVAKSPEAKSPLQSQPHSRMKPAGSVNDMALDAFDLDRMKQEILEEVVRELHKVKEEIIDAIRQELSGISTT

SEQ ID NO: 1378 - protein, 311 aa, Homo Sapiens
MAEASPHPGRYFCHCCSVEIVPRLPDYICPRCESGFIEELPEETRSTENGSAPSTAPTDQSRPPLEHVDQHLFTLPQGYGQFAFGIFDDSFEIPTFPPGAQADDGRDPESRRERDHPSRHRYGARQPRARLTTRRATGRHEGVPTLEGIIQQLVNGIITPATIPSLGPWGVLHSNPMDYAWGANGLDAIITQLLNQFENTGPPPADKEKIQALPTVPVTEEHVGSGLECPVCKDDYALGERVRQLPCNHLFHDGCIVPWLEQHDSCPVCRKSLTGQNTATNPPGLTGVSFSSSSSSSSSSSPSNENATSNS

SEQ ID NO: 1379 - protein, 813 aa, Homo Sapiens
DPETPSDAAAMESGPRAELGAGAPPAVVARTPPEPRPSPEGDPSPPPPPMSALVPDTPPDTPPAMKNATSSKQLPLEPESPSGQVGPRPAPPQEESPSSEAKSRGPTPPAMGPRDARPPRRSSQPSPTAVPASDSPPTKQEVKKAGERHKLAKERREERAKYLAAKKAVWLEKEEKAKALREKQLQERRRRLEEQRLKAEQRRAALEERQRQKLEKNKERYEAAIQRSVKKTWAEIRQQRWSWAGALHHSSPGHKTNRSLQLSAWESSIVDRLMTPTLSFLARSRSAVTLPRNGRDQGRGCDPGRGPTWGRAGASLARGPQPDRTHPSAAVPVCPRSASASPLTPCSVTRSVHRCAPAGERGERRKPNAGGSPAPVRRRPEASPVQKKEKKDKERENEKEKSALARERSLKKRQSLPASPRARLSASTASELSPKSKARPSSPSTSWHRPASPCPSPGPGHTLPPKPPSPRGTTASPKGRVRRKEEAKESPSAAGPEDKSQSKRRASNEKESAAPASPAPSPAPSPTPAPPQKEQPPAETPTDAAVLTSPPAPAPPVTPSKPMAGTTDREEATRLLAEKRRQAREQREREEQERRLQAERDKRMREEQLAREAEARAEREAEARRREEQEAREKAQAEQEEQERLQKQKEEAEARSREEAERQRLEREKHFQQQEQERQERRKRLEEIMKRTRKSEVSETKKQDSKEANANGSSPEPVKAVEARSPGLQKEAVQKEEPIPQEPQWSLPSKELPASLVNGLQPLPAHQENGFSTNGPSGDKSLSRTPETLLPFAEAEAFLKKAVVQSPQVTEVL

SEQ ID NO: 1380 - protein, 1659 aa, Homo Sapiens
MEAPSGSEPGGDGAGDCAHPDPRAPGAAAPSSGPGPCAAARESERQLRLRLCVLNEILGTERDYVGTLRFLQSAFLHRIRQNVADSVEKGLTEENVKVLFSNIEDILEVHKDFLAALEYCLHPEPQSQHELGNVFLKFKDKFCVYEEYCSNHEKALRLLVELNKIPTVRAFLLSCMLLGGRKTTDIPLEGYLLSPIQRICKYPLLLKELAKRTPGKHPDHPAVQSALQAMKTVCSNINETKRQMEKLEALEQLQSHIEGWEGSNLTDICTQLLLQGTLLKISAGNIQERAFFLFDNLLVYCKRKSRVTGSKKSTKRTKSINGSLYIFRGRINTEVMEVENVEDGTADYHSNGYTVTNGWKIHNTAKNKWFVCMAKTAEEKQKWLDAIIREREQRESLKLGMERDAYVMIAEKGEKLYHMMMNKKVNLIKDRRRKLSTVPKCFLGNEFVAWLLEIGEISKTEEGVNLGQALLENGIIHHVSDKHQFKNEQVMYRFRYDDGTYKARSELEDIMSKGVRLYCRLHSLYTPVIKDRDYHLKTYKSVLPGSKLVDWLLAQGDCQTREEAVALGVGLCNNGFMHHVLEKSEFRDESQYFRFHADEEMEGTSSKNKQLRNDFKLVENILAKRLLILPQEEDYGFDIEEKNKAVVVKSVQRGSLAEVAGLQVGRKIYSINEDLVFLRPFSEVESILNQSFCSRRPLRLLVATKAKEIIKIPDQPDTLCFQIRGAAPPYVYAVGRGSEAMAAGLCAGQCILKVNGSNVMNDGAPEVLEHFQAFRSRREEALGLYQWIYHTHEDAQEARASQEASTEDPSGEQAQEEDQADSAFPLLSLGPRLSLCEDSPMVTLTVDNVHLEHGVVYEYVSTAGVRCHVLEKIVEPRGCFGLTAKILEAFAANDSVFVENCRRLMALSSAIVTMPHFEFRNICDTKLESIGQRIACYQEFAAQLKSRVSPPFKQAPLEPHPLCGLDFCPTNCHINLMEVSYPKTTPSVGRSFSIRFGRKPSLIGLDPEQGHLNPMSYTQHCITTMAAPSWKCLPAAEGDPQGQGLHDGSFGPASGTLGQEDRGLSFLLKQEDREIQDAYLQLFTKLDVALKEMKQYVTQINRLLSTITEPTSGGSCDASLAEEASSLPLVSEESEMDRSDHGGIKKVCFKVAEEDQEDSGHDTMSYRDSYSECNSNRDSVLSYTSVRSNSSYLGSDEMGSGDELPCDMRIPSDKQDKLHGCLEHLFNQVDSINALLKGPVMSRAFEETKHFPMNHSLQEFKQKEECTIRGRSLIQISIQEDPWNLPNSIKTLVDNIQRYVEDGKNQLLLALLKCTDTELQLRRDAIFCQALVAAVCTFSEQLLAALGYRYNNNGEYEESSRDASRKWLEQVAATGVLLHCQSLLSPATVKEERTMLEDIWVTLSELDNVTFSFKQLDENYVANTNVFYHIEGSRQALKVIFYLDSYHFSKLPSRLEGGASLRLHTALFTKVLENVEGLPSPGSQAAEDLQQDINAQSLEKVQQYYRKLRAFYLERSNLPTDASTTAVKIDQLIRPINALDELCRLMKSFVHPKPGAAGSVGAGLIPISSELCYRLGACQMVMCGTGMQRSTLSVSLEQAAILARSHGLLPKCIMQATDIMRKQGPRVEILAKNLRVKDQMPQGAPRLYRLCQPPVDGDL

SEQ ID NO: 1381 - protein, 401 aa, Homo Sapiens
MSLYDDLGVETSDSKTEGWSKNFKLLQSQLQVKKAALTQAKSQRTKQSTVLAPVIDLKRGGSSDDRQIVDTPPHVAAGLKDPVPSGFSAGEVLIPLADEYDPMFPNDYEKVVKRQREERQRQRELERQKEIEEREKRRKDRHEASGFARRPDPDSDEDEDYERERRKRSMGGAAIAPPTSLVEKDKELPRDFPYEEDSRPRSQSSKAAIPPPVYEEQDRPRSPTGPSNSFLANMGGTVAHKIMQKYGFREGQGLGKHEQGLSTALSVEKTSKRGGKIIVGDATEKDASKKSDSNPLTEILKCPTKVVLLRNMVGAGEVDEDLEVETKEECEKYGKVGKCVIFEIPGAPDDEAVRIFLEFERVESAIKAVVDLNGRYFGGRVVKACFYNLDKFRVLDLAEQV

SEQ ID NO: 1382 - protein, 373 aa, Homo Sapiens
MDTLEEVTWANGSTALPPPLAPNISVPHRCLLLLYEDIGTSRVRYWDLLLLIPNVLFLIFLLWKLPSARAKIRITSSPIFITFYILVFVVALVGIARAVVSMTVSTSNAATVADKILWEITRFFLLAIELSVIILGLAFGHLESKSSIKRVLAITTVLSLAYSVTQGTLEILYPDAHLSAEDFNIYGHGGRQFWLVSSCFFFLVYSLVVILPKTPLKERISLPSRRSFYVYAGILALLNLLQGLGSVLLCFDIIEGLCCVDATTFLYFSFFAPLIYVAFLRGFFGSEPKILFSYKCQVDETEEPDVHLPQPYAVARREGLEAAGAAGASAASYSSTQFDSAGGVAYLDDIASMPCHTGSINSTDSERWKAINA

SEQ ID NO: 1383 - protein, 158 aa, Homo Sapiens
MAEQATKSVLFVCLGNICRSPIAEAVFRKLVTDQNISENWVIDSGAVSDWNVGRSPDPRAVSCLRNHGIHTAHKARQITKEDFATFDYILCMDESNLRDLNRKSNQVKTCKAKIELLGSYDPQKQLIIEDPYYGNDSDFETVYQQCVRCCRAFLEKAH

SEQ ID NO: 1384 - protein, 432 aa, Homo Sapiens
MSDKLPYKVADIGLAAWGRKALDIAENEMPGLMRMRERYSASKPLKGARIAGCLHMTVETAVLIETLVTLGAEVQWSSCNIFSTQDHAAAAIAKAGIPVYAWKGETDEEYLWCIEQTLYFKDGPLNMILDDGGDLTNLIHTKYPQLLPGIRGISEETTTGVHNLYKMMANGILKVPAINVNDSVTKSKFDNLYGCRESLIDGIKRATDVMIAGKVAVVAGYGDVGKGCAQALRGFGARVIITEIDPINALQAAMEGYEVTTMDEACQEGNIFVTTTGCIDIILGRHFEQMKDDAIVCNIGHFDVEIDVKWLNENAVEKVNIKPQVDRYRLKNGRRIILLAEGRLVNLGCAMGHPSFVMSNSFTNQVMAQIELWTHPDKYPVGVHFLPKKLDEAVAEAHLGKLNVKLTKLTEKQAQYLGMSCDGPFKPDHYRY

SEQ ID NO: 1385 - protein, 558 aa, Homo Sapiens
MAALTRDPQFQKLQQWYREHRSELNLRRLFDANKDRFNHFSLTLNTNHGHILVDYSKNLVTEDVMRMLVDLAKSRGVEAARERMFNGEKINYTEGRAVLHVALRNRSNTPILVDGKDVMPEVNKVLDKMKSFCQRVRSGDWKGYTGKTITDVINIGIGGSDLGPLMVTEALKPYSSGGPRVWYVSNIDGTHIAKTLAQLNPESSLFIIASKTFTTQETITNAETAKEWFLQAAKDPSAVAKHFVALSTNTTKVKEFGIDPQNMFEFWDWVGGRYSLWSAIGLSIALHVGFDNFEQLLSGAHWMDQHFRTTPLEKNAPVLLALLGIWYINCFGCETHAMLPYDQYLHRFAAYFQQGDMESNGKYITKSGTRVDHQTGPIVWGEPGTNGQHAFYQLIHQGTKMIPCDFLIPVQTQHPIRKGLHHKILLANFLAQTEALMRGKSTEEARKELQAAGKSPEDLERLLPHKVFEGNRPTNSIVFTKLTPFMLGALVAMYEHKIFVQGIIWDINSFDQWGVELGKQLAKKIEPELDGSAQVTSHDASTNGLINFIKQQREARVQ

SEQ ID NO: 1386 - protein, 316 aa, Homo Sapiens
MASTSRLDALPRVTCPNHPDAILVEDYRAGDMICPECGLVVGDRVIDVGSEWRTFSNDKATKDPSRVGDSQNPLLSDGDLSTMIGKGTGAASFDEFGNSKYQNRRTMSSSDRAMMNAFKEITTMADRINLPRNIVDRTNNLFKQVYEQKSLKGRANDAIASACLYIACRQEGVPRTFKEICAVSRISKKEIGRCFKLILKALETSVDLITTGDFMSRFCSNLCLPKQVQMAATHIARKAVELDLVPGRSPISVAAAAIYMASQASAEKRTQKEIGDIAGVADVTIRQSYRLIYPRAPDLFPTDFKFDTPVDKLPQL

SEQ ID NO: 1387 - protein, 316 aa, Homo Sapiens
MSAEVETSEGVDESEKKNSGALEKENQMRMADLSELLKEGTKEAHDRAENTQFVKDFLKGNIKKELFKLATTALYFTYSALEEEMERNKDHPAFAPLYFPMELHRKEALTKDMEYFFGENWEEQVQCPKAAQKYVERIHYIGQNEPELLVAHAYTRYMGDLSGGQVLKKVAQRALKLPSTGEGTQFYLFENVDNAQQFKQLYRARMNALDLNMKTKERIVEEANKAFEYNMQIFNELDQAGSTLARETLEDGFPVHDGKGDMRKCPFYAAEQDKGALEGSSCPFRTAMAVLRKPSLQFILAAGVALAAGLLAWYYM

SEQ ID NO: 1388 - protein, 973 aa, Homo Sapiens [sequence omitted]

SEQ ID NO: 1389 - protein, 876 aa, Homo Sapiens
MELITILEKTVSPDRLELEAAQKFLERAAVENLPTFLVELSRVLANPGNSQVARVAAGLQIKNSLTSKDPDIKAQYQQRWLAIDANARREVKNYVLQTLGTETYRPSSASQCVAGIACAEIPVNQWPELIPQLVANVTNPNSTEHMKESTLEAIGYICQDIDPEQLQDKSNEILTAIIQGMRKEEPSNNVKLAATNALLNSLEFTKANFDKESERHFIMQVVCEATQCPDTRVRVAALQNLVKIMSLYYQYMETYMGPALFAITIEAMKSDIDEVALQGIEFWSNVCDEEMDLAIEASEAAEQGRPPEHTSKFYAKGALQYLVPILTQTLTKQDENDDDDDWNPCKAAGVCLMLLATCCEDDIVPHVLPFIKEHIKNPDWRYRDAAVMAFGCILEGPEPSQLKPLVIQAMPTLIELMKDPSVVVRDTAAWTVGRICELLPEAAINDVYLAPLLQCLIEGLSAEPRVASNVCWAFSSLAEAAYEAADVADDQEEPATYCLSSSFELIVQKLLETTDRPDGHQNNLRSSAYESLMEIVKNSAKDCYPAVQKTTLVIMERLQQVLQMESHIQSTSDRIQFNDLQSLLCATLQNVLRKVQHQDALQISDVVMASLLRMFQSTAGSGGVQEDALMAVSTLVEVLGGEFLKYMEAFKPFLGIGLKNYAEYQVCLAAVGLVGDLCRALQSNIIPFCDEVMQLLLENLGNENVHRSVKPQILSVFGDIALAIGGEFKKYLEVVLNTLQQASQAQVDKSDYDMVDYLNELRESCLEAYTGIVQGLKGDQENVHPDVMLVQPRVEFILSFIDHIAGDEDHTDGVVACAAGLIGDLCTAFGKDVLKLVEARPMIHELLTEGRRSKTNKAKTLATWATKELRKLKNQA

SEQ ID NO: 1390 - protein, 350 aa, Homo Sapiens
MFIKGRAPRAPPRERRRATRGGLRQVVAPPRALGSTSRPHFRRASVCRRRCRKSGGLLAASRKMAAAAVNGAAGFSSSGPAATSGAVLQAATGMYEQLKGEWNRKSPNLSKCGEELGRLKLVLLELNFLPTTGTKLTKQQLILARDILEIGAQWSILRKDIPSFERYMAQLKCYYFDYKEQLPESAYMHQLLGLNLLFLLSQNRVAEFHTELERLPAKDIQTNVYIKHPVSLEQYLMEGSYNKVFLAKGNIPAESYTFFIDILLDTIRDEIAGCIEKAYEKILFTEATRILFFNTPKKMTDYAKKRGWVLGPNNYYSFASQQQKPEDTTIPSTELAKQVIEYARQLEMIV

SEQ ID NO: 1391 - protein, 2472 aa, Homo Sapiens
MDPSGVKVLETAEDIQERRQQVLDRYHRFKELSTLRRQKLEDSYRFQFFQRDAEELEKWIQEKLQIASDENYKDPTNLQGKLQKHQAFEAEVQANSGAIVKLDETGNLMISEGHFASETIRTRLMELHRQWELLLEKMREKGIKLLQAQKLVQYLRECEDVMDWINDKEAIVTSEELGQDLEHVEVLQKKFEEFQTDMAAHEERVNEVNQFAAKLIQEQHPEEELIKTKQDEVNAAWQRLKGLALQRQGKLFGAAEVQRFNRDVDETISWIKEKEQLMASDDFGRDLASVQALLRKHEGLERDLAALEDKVKALCAEADRLQQSHPLSATQIQVKREELITNWEQIRTLAAERHARLNDSYRLQRFLADFRDLTSWVTEMKALINADELASDVAGAEALLDRHQEHKGEIDAHEDSFKSADESGQALLAAGHYASDEVREKLTVLSEERAALLELWELRRQQYEQCMDLQLFYRDTEQVDNWMSKQEAFLLNEDLGDSLDSVEALLKKHEDFEKSLSAQEEKITALDEFATKLIQNNHYAMEDVATRRDALLSRRNALHERAMRRRAQLADSFHLQQFFRDSDELKSWVNEKMKTATDEAYKDPSNLQGKVQKHQAFEAELSANQSRIDALEKAGQKLIDVNHYAKDEVAARMNEVISLWKKLLEATELKGIKLREANQQQQFNRNVEDIELWLYEVEGHLASDDYGKDLTNVQNLQKKHALLEADVAAHQDRIDGITIQARQFQDAGHFDAENIKKKQEALVARYEALKEPMVARKQKLADSLRLQQLFRDVEDEETWIREKEPIAASTNRGKDLIGVQNLLKKHQALQAEIAGHEPRIKAVTQKGNAMVEEGHFAAEDVKAKLHELNQKWEALKAKASQRRQDLEDSLQAQQYFADANEAESWMREKEPIVGSTDYGKDEDSAEALLKKHEALMSDLSAYGSSIQALREQAQSCRQQVAPTDDETGKELVLALYDYQEKSPREVTMKKGDILTLLNSTNKDWWKVEVNDRQGFVPAAYVKKLDPAQSASRENLLEEQGSIALRQEQIDNQTRITKEAGSVSLRMKQVEELYHSLLELGEKRKGMLEKSCKKFMLFREANELQQWINEKEAALTSEEVGADLEQVEVLQKKFDDFQKDLKANESRLKDINKVAEDLESEGLMAEEVQAVQQQEVYGMMPRDETDSKTASPWKSARLMVHTVATFNSIKELNERWRSLQQLAEERSQLLGSAHEVQRFHRDADETKEWIEEKNQALNTDNYGHDLASVQALQRKHEGFERDLAALGDKVNSLGETAERLIQSHPESAEDLQEKCTELNQAWSSLGKRADQRKAKLGDSHDLQRFLSDFRDLMSWINGIRGLVSSDELAKDVTGAEALLERHQEHRTEIDARAGTFQAFEQFGQQLLAHGHYASPEIKQKLDILDQERADLEKAWVQRRMMLDQCLELQLFHRDCEQAENWMAAREAFLNTEDKGDSLDSVEALIKKHEDFDKAINVQEEKIAALQAFADQLIAAGHYAKGDISSRRNEVLDRWRRLKAQMIEKRSKLGESQTLQQFSRDVDEIEAWISEKLQTASDESYKDPTNIQSKHQKHQAFEAELHANADRIRGVIDMGNSLIERGACAGSEDAVKARLAALADQWQFLVQKSAEKSQKLKEANKQQNFNTGIKDFDFWLSEVEALLASEDYGKDLASVNNLLKKHQLLEADISAHEDRLKDLNSQADSLMTSSAFDTSQVKDKRDTINGRFQKIKSMAASRRAKLNESHRLHQFFRDMDDEESWIKEKKLLVGSEDYGRDLTGVQNLRKKHKRLEAELAAHEPAIQGVLDTGKKLSDDNTIGKEEIQQRLAQFVEHWKELKQLAAARGQRLEESLEYQQFVANVEEEEAWINEKMTLVASEDYGDTLAAIQGLLKKHEAFETDFTVHKDRVNDVCTNGQDLIKKNNHHEENISSKMKGLNGKVSDLEKAAAQRKAKLDENSAFLQFNWKADVVESWIGEKENSLKTDDYGRDLSSVQTLLTKQETFDAGLQAFQQEGIANITALKDQLLAAKHVQSKAIEARHASLMKRWSQLLANSAARKKKLLEAQSHFRKVEDLFLTFAKKASAFNSWFENAEEDLTDPVRCNSLEEIKALREAHDAFRSSLSSAQADFNQLAELDRQIKSFRVASNPYTWFTMEALEETWRNLQKIIKERELELQKEQRRQEENDKLRQEFAQHANAFHQWIQETRTYLLDGSCMVEESGTLESQLEATKRKHQEIRAMRSQLKKIEDLGAAMEEALILDNKYTEHSTVGLAQQWDQLDQLGMRMQHNLEQQIQARNTTGVTEEALKEFSMMFKHFDKDKSGRLNHQEFKSCLRSLGYDLPMVEEGEPDPEFEAILDTVDPNRDGHVSLQEYMAFMISRETENVKSSEEIESAFRALSSEGKPYVTKEELYQNLTREQADYCVSHMKPYVDGKGRELPTAFDYVEFTRSLFVN

SEQ ID NO: 1392 - protein, 299 aa, Homo Sapiens
MMGKEEEIARIARRLDKMVTKKSAEGAMDLLRELKAMPITLHLLQSTRVGMSVNALRKQSSDEEVIALAKSLIKSWKKLLDASDAKARERGRGMPLPTSSRDASEAPDPSRKRPELPRAPSTPRITTFPPVPVTCDAVRNKCREMLTAALQTDHDHVAIGADCERLSAQIEECIFRDVGNTDMKYKNRVRSRISNLKDAKNPDLRRNVLCGAITPQQIAVMTSEEMASDELKEIRKAMTKEAIREHQMARTGGTQTDLFTCGKCRKKNCTYTQVQTRSSDEPMTTFVVCNECGNRWKFC

SEQ ID NO: 1393 - protein, 172 aa, Homo Sapiens
MIIYRDLISHDEMFSDIYKIREIADGLCLEVEGKMVSRTEGNIDDSLIGGNASAEGPEGEGTESTVITGVDIVMNHHLQETSFTKEAYKKYIKDYMKSIKGKLEEQRPERVKPFMTGAAEQIKHILANFKNYQFFIGENMNPDGMVALLDYREDGVTPYMIFFKDGLEMEKC

SEQ ID NO: 1394 - protein, 556 aa, Homo Sapiens
MAREKEMQEFTRSFFRGRPDLSTLTHSIVRRRYLAHSGRSHLEPEEKQALKRLVEEELLKMQVDEAASREDKLDLTKKGKRPPTPCSDPERKRFRFNSESESGSEASSPDYFGPPAKNGVAAEVSPAKEENPRRASKAVEESSDEERQRDLPAQRGEESSEEEEKGYKGKTRKKPVVKKQAPGKASVSRKQAREESEESEAEPVQRTAKKVEGNKGTKSLKESEQESEEEILAQKKEQREEEVEEEEKEEDEEKGDWKPRTRSNGRRKSAREERSCKQKSQAKRLLGDSDSEEEQKEAASSGDDSGRDREPPVQRKSEDRTQLKGGKRLSGSSEDEEDSGKGEPTAKGSRKMARLGSTSGEESDLEREVSDSEAGGGPQGERKNRSSKKSSRKGRTRSSSSSSDGSPEAKGGKAGSGRRGEDHPAVMRLKRYIRACGAHRNYKKLLGSCCSHKERLSILRAELEALGMKGTPSLGKCRALKEQREEAAEVASLDVANIISGSGRPRRRTAWNPLGEAAPPGELYRRTLDSDEERPRPAPPDWSHMRGIISSDGESN

SEQ ID NO: 1395 - protein, 548 aa, Homo Sapiens
MAKFMTPVIQDNPSGWGPCAVPEQFRDMPYQPFSKGDRLGKVADWTGATYQDKRYTNKYSSQFGGGSQYAYFHEEDESSFQLVDTARTQKTAYQRNRMRFAQRNLRRDKDRRNMLQFNLQILPKSAKQKERERIRLQKKFQKQFGVRQKWDQKSQKPRDSSVEVRSDWEVKEEMDFPQLMKMRYLEVSEPQDIECCGALEYYDKAFDRITTRSEKPLRSIKRIFHTVTTTDDPVIRKLAKTQGNVFATDAILATLMSCTRSVYSWDIVVQRVGSKLFFDKRDNSDFDLLTVSETANEPPQDEGNSFNSPRNLAMEATYINHNFSQQCLRMGKERYNFPNPNPFVEDDMDKNEIASVAYRYRRWKLGDDIDLIVRCEHDGVMTGANGEVSFINIKTLNEWDSRHCNGVDWRQKLDSQRGAVIATELKNNSYKLARWTCCALLAGSEYLKLGYVSRYHVKDSSRHVILGTQQFKPNEFASQINLSVENAWGILRCVIDICMKLEEGKYLILKDPNKQVIRVYSLPDGTFSSDEDEEEEEEEEEEEEEEET

SEQ ID NO: 1396 - protein, 621 aa, Homo Sapiens
MGLLSDPVRRRALARLVLRLNAPLCVLSYVAGIAWFLALVFPPLTQRTYMSENAMGSTMVEEQFAGGDRARAFARDFAAHRKKSGALPVAWLERTMRSVGLEVYTQSFSRKLPFPDETHERYMVSGTNVYGILRAPRAASTESLVLTVPCGSDSTNSQAVGLLLALAAHFRGQIYWAKDIVFLVTEHDLLGTEAWLEAYHDVNVTGMQSSPLQGRAGAIQAAVALELSSDVVTSLDVAVEGLNGQLPNLDLLNLFQTFCQKGGLLCTLQGKLQPEDWTSLDGPLQGLQTLLLMVLRQASGRPHGSHGLFLRYRVEALTLRGINSFRQYKYDLVAVGKALEGMFRKLNHLLERLHQSFFLYLLPGLSRFVSIGLYMPAVGFLLLVLGLKALELWMQLHEAGMGLEEPGGAPGPSVPLPPSQGVGLASLVAPLLISQAMGLALYVLPVLGQHVATQHFPVAEAEAVVLTLLAIYAAGLALPHNTHRVVSTQAPDRGWMALKLVALIYLALQLGCIALTNFSLGFLLATTMVPTAALAKPHGPRTLYAALLVLTSPAATLLGSLFLWRELQEAPLSLAEGWQLFLAALAQGVLEHHTYGALLFPLLSLGLYPCWLLFWNVLFWK

SEQ ID NO: 1397 - protein, 1980 aa, Homo Sapiens
MNPTNPFSGQQPSAFSASSSNVGTLPSKPPFRFGQPSLFGQNSTLSGKSSGFSQVSSFPASSGVSHSSSVQTLGFTQTSSVGPFSGLEHTSTFVATSGPSSSSVLGNTGFSFKSPTSVGAFPSTSAFGQEAGEIVNSGFGKTEFSFKPLENAVFKPILGAESEPEKTQSQIASGFFTFSHPISSAPGGLAPFSFPQVTSSSATTSNFTFSKPVSSNNSLSAFTPALSNQNVEEEKRGPKSIFGSSNNSFSSFPVSSAVLGEPFQASKAGVRQGCEEAVSQVEPLPSLMKGLKRKEDQDRSPRRHGHEPAEDSDPLSRGDHPPDKRPVRLNRPRGGTLFGRTIQDVFKSNKEVGRLGNKEAKKETGFVESAESDHMAIPGGNQSVLAPSRIPGVNKEEETESREKKEDSLRGTPARQSNRSESTDSLGGLSPSEVTAIQCKNIPDYLNDRTILENHFGKIAKVQRIFTRRSKKLAVVHFFDHASAALARKKGKSLHKDMAIFWHRKKISPNKKPFSLKEKKPGDGEVSPSTEDAPFQHSPLGKAAGRTGASSLLNKSSPVKKPSLLKAHQFEGDSFDSASEGSEGLGPCVLSLSTLIGTVAETSKEKYRLLDQRDRIMRQARVKRTDLDKARTFVGTCLDMCPEKERYMRETRSQLSVFEVVPGTDQVDHAAAVKEYSRSSADQEEPLPHELRPLPVLSRTMDYLVTQIMDQKEGSLRDWYDFVWNRTRGIRKDITQQHLCDPLTVSLIEKCTRFHIHCAHFMCEEPMSSFDAKINNENMTKCLQSLKEMYQDLRNKGVFCASEAEFQGYNVLLSLNKGDILREVQQFHPAVRNSSEVKFAVQAFAALNSNNFVRFFKLVQSASYLNACLLHCYFSQIRKDALRALNFAYTVSTQRSTIFPLDGVVRMLLFRDCEEATDFLTCHGLTVSDGCVELNRSAFLEPEGLSKTRKSVFITRKLTVSVGEIVNGGPLPPVPRHTPVCSFNSQNKYIGESLAAELPVSTQRPGSDTVGGGRGEECGVEPDAPLSSLPQSLPAPAPSPVPLPPVLALTPSVAPSLFQLSVQPEPPPPEPVPMYSDEDLAQVVDELIQEALQRDCEEVGSAGAAYAAAALGVSNAAMEDLLTAATTGILRHIAAEEVSKERERREQERQRAEEERLKQERELVLSELSQGLAVELMERVMMEFVRETCSQELKNAVETDQRVRVARCCEDVCAHLVDLFLVEEIFQTAKETLQELQCFCKYLQRWREAVTARKKLRRQMRAFPAAPCCVDVSDRLRALAPSAECPIAEENLARGLLDLGHAGRLGISCTRLRRLRNKTAHQMKVQHFYQQLLSDVAWASLDLPSLVAEHLPGRQEHVFWKLVLVLPDVEEQSPESCGRILANWLKVKFMGDEGSVDDTSSDAGGIQTLSLFNSLSSKGDQMISVNVCIKVAHGALSDGAIDAVETQKDLLGASGLMLLLPPKMKSEDMAEEDVYWLSALLQLKQLLQAKPFQPALPLVVLVPSPGGDAVEKEVEDGLMLQDLVSAKLISDYTVTEIPDTINDLQGSTKVLQAVQWLVSHCPHSLDLCCQTLIQYVEDGIGHEFSGRFFHDRRERRLGGLASQEPGAIIELFNSVLQFLASVVSSEQLCDLSWPVTEFAEAGGSRLLPHLHWNAPEHLAWLKQAVLGFQLPQMDLPPLGAPWLPVCSMVVQYASQIPSSRQTQPVLQSQVENLLHRTYCRWKSKSPSPVHGAGPSVMEIPWDDLIALCINHKLRDWTPPRLPVTSEALSEDGQICVYFFKNDLKKYDVPLSWEQARLQTQKELQLREGRLAIKPFHPSANNFPIPLLHMHRNWKRSTECAQEGRIPSTEDLMRGASAEELLAQCLSSSLLLEKEENKRFEDQLQQWLSEDSGAFTDLTSLPLYLPQTLVSLSHTIEPVMKTSVTTSPQSDMMREQLQLSEATGTCLGERLKHLERLIRSSREEEVASELHLSALLDMVDI

SEQ ID NO: 1398 - protein, 353 aa, Homo Sapiens
MAMTLLEDWCRGMDVNSQRALLVWGIPVNCDEAEIEETLQAAMPQVSYRMLGRMFWREENAKAALLELTGAVDYAAIPREMPGKGGVWKVLFKPPTSDAEFLERLHLFLAREGWTVQDVARVLGFQNPTPTPGPEMPAEMLNYILDNVIQPLVESIWYKRLTLFSGRDIPGPGEETFDPWLEHTNEVLEEWQVSDVEKRRRLMESLRGPAADVIRILKSNNPAITTAECLKALEQVFGSVESSRDAQIKFLNTYQNPGEKLSAYVIRLEPLLQKVVEKGAIDKDNVNQARLEQVIAGANHSGAIRRQLWLTGAGEGPAPNLFQLLVQIREEEAKEEEEEAEATLLQLGLEGHF

SEQ ID NO: 1399 - protein, 332 aa, Homo Sapiens
VPLAALGAPTLDPALAALGLPGANLNSQSLAADQLLKLMSTVDPKLNHVAAGLVSPSLKSDTSSKEIEEAMKRVREAQSLISAAIEPDKKEEKRRHSRSRSRSRRRRTPSSSRHRRSRSRSRRRSHSKSRSRRRSKSPRRRRSHSRERGRRSRSTSKTRDKKKEDKEKKRSKTPPKSYSTARRSRSASRERRRRRSRSGTRSPKKPRSPKRKLSRSPSPRRHKKEKKKDKDKERSRDERERSTSKKKKSKDKEKDRERKSESDKDVKQVTRDYDEEEQGYDSEKEKKEEKKPIETGSPKTKERSVEKGTGDSLRESKVNGDDHHEEDMDMSD

SEQ ID NO: 1400 - protein, 288 aa, Homo Sapiens
MSSRKQGSQPRGQQSAEEENFKKPTRSNMQRSKMRGASSGKKTAGPQQKNLEPALPGRWGGRSAENPPSGSVRKTRKNKQKTPGNGDGGSTSEAPQPPRKKRARADPTVESEEAFKNRMEVKVKIPEELKPWLVEDWDLVTRQKQLFQLPAKKNVDAILEEYANCKKSQGNVDNKEYAVNEVVAGIKEYFNVMLGTQLLYKFERPQYAEILLAHPDAPMSQVYGAPHLLRLFVRIGAMLAYTPLDEKSLALLLGYLHDFLKYLAKNSASLFTASDYKVASAEYHRKAL

SEQ ID NO: 1401 - protein, 1205 aa, Homo Sapiens
MRKPRRKSRQNAEGRRSPSPYSLKCSPTRETLTYAQAQRIVEVDIDGRLHRISIYDPLKIITEDELTAQDITECNSNKENSEQPQFPGKSKKPSSKGKKKESCSKHASGTSFHLPQPSFRMVDSGIQPEAPPLPAAYYRYIEKPPEDLDAEVEYDMDEEDLAWLDMVNEKRRVDGHSLVSADTFELLVDRLEKESYLESRSSGAQQSLIDEDAFCCVCLDDECHNSNVILFCDICNLAVHQECYGVPYIPEGQWLCRCCLQSPSRPVDCILCPNKGGAFKQTSDGHWAHVVCAIWIPEVCFANTVFLEPIEGIDNIPPARWKLTCYICKQKGLGAAIQCHKVNCYTAFHVTCAQRAGLFMKIEPMRETSLNGTIFTVRKTAYCEAHSPPGAATARRKGDSPRSISETGDEEGLKEGDGEEEEEEEVEEEEQEAQGGVSGSLKGVPKKSKMSLKQKIKKEPEEAGQDTPSTLPMLAVPQIPSYRLNKICSGLSFQRKNQFMQRLHNYWLLKRQARNGVPLIRRLHSHLQSQRNAEQREQDEKTSAVKEELKYWQKLRHDLERARLLIELIRKREKLKREQVKVQQAAMELELMPFNVLLRTTLDLLQEKDPAHIFAEPVNLSEVPDYLEFISKPMDFSTMRRKLESHLYRTLEEFEEDFNLIVTNCMKYNAKDTIFHRAAVRLRDLGGAILRHARRQAENIGYDPERGTHLPESPKLEDFYRFSWEDVDNILIPENRAHLSPEVQLKELLEKLDLVSAMRSSGARTRRVRLLRREINALRQKLAQPPPPQPPSLNKTVSNGELPAGPQGDAAVLEQALQEEPEDDGDRDDSKLPPPPTLEPTGPAPSLSEQESPPEPPTLKPINDSKPPSRFLKPRKVEEDELLEKSPLQLGNEPLQRLLSDNGINRLSLMAPDTPAGTPLSGVGRRTSVLFKKAKNGVKLQRSPDRVLENGEDHGVAGSPASPASIEEERHSRKRPRSRSCSESEGERSPQQEEETGMTNGFGKHTESGSDSECSLGLSGGLAFEACSGLTPPKRSRGKPALSRVPFLEGVNGDSDYNGSGRSLLLPFEDRGDLEPLELVWAKCRGYPSYPALIIDPKMPREGLLHNGVPIPVPPLDVLKLGEQKQAEAGEKLFLVLFFDNKRTWQWLPRDKVLPLGVEDTVDKLKMLEGRKTSIRKSVQVAYDRAMIHLSRVRGPHSFVTSSYL

SEQ ID NO: 1402 - protein, 192 aa, Homo Sapiens
MAPKPGAEWSTALSHLVLGVVSLHAAVSTAEASRGAAAGFLLQVLAATTTLAPGLSTHEDCLAGAWVATVIGLPLLAFDFHWVNGDRSSANLLLGGGMVLAVAGGHLGPEGRSVAGQAMLLVVAVTILIVAVFTANTYGMWGGAMLGVAGLLSRLEEDRLLLLPKEDVCRWALAVGSWAYCRALHTQRLQWE

SEQ ID NO: 1403 - protein, 154 aa, Homo Sapiens
MTTTTTFKGVDPNSRNSSRVLRPPGGGSNFSLGFDEPTEQPVRKNKMASNIFGTPEENQASWAKSAGAKSSGGREDLESSGLQRRNSSEASSGDFLDLKGEGDIHENVDTDLPGSLGQSEEKPVPAAPVPSPVAPAPVPSRRNPPGGKSSLVLG

SEQ ID NO: 1404 - protein, 142 aa, Homo Sapiens
MAAAVAAAGAGEPQSPDELLPKGDAEKPEEELEEDDDEELDETLSERLWGLTEMFPERVRSAAGATFDLSLFVAQKMYRFSRAALWIGTTSFMILVLPVVFETEKLQMEQQQQLQQRQILLGPNTGLSGGMPGALPSLPGKI

SEQ ID NO: 1405 - protein, 2217 aa, Homo Sapiens
MDGDGGRRDVPGTLMEPGRGAGPAGMAEPRAKAARPGPQRFLRRSVVESDQEEPPGLEAAEAPGPQPPQPLQRRVLLLCKTRRLIAERARGRPAAPAPAALVAQPGAPGAPADAGPEPVGTQEPGPDPIAAAVETAPAPDGGPREEAAATVRKEDEGAAEAKPEPGRTRRDEPEEEEDDEDDLKAVATSLDGRFLKFDIELGRGSFKTVYKGLDTETWVEVAWCELQDRKLTKLERQRFKEEAEMLKGLQHPNIVRFYDFWESSAKGKRCIVLVTELMTSGTLKTYLKRFKVMKPKVLRSWCRQILKGLLFLHTRTPPIIHRDLKCDNIFITGPTGSVKIGDLGLATLKRASFAKSVIGTPEFMAPEMYEEHYDESVDVYAFGMCMLEMATSEYPYSECQNAAQIYRKVTCGIKPASFEKVHDPEIKEIIGECICKNKEERYEIKDLLSHAFFAEDTGVRVELAEEDHGRKSTIALRLWVEDPKKLKGKPKDNGAIEFTFDLEKETPDEVAQEMIESGFFHESDVKIVAKSIRDRVALIQWRRERIWPALQPKEQQDVGSPDKARGPPVPLQVQVTYHAQAGQPGPPEPEEPEADQHLLPPTLPTSATSLASDSTFDSGQGSTVYSDSQSSQQSVMLGSLADAAPSPAQCVCSPPVSEGPVLPQSLPSLGAYQQPTAAPGLPVGSVPAPACPPSLQQHFPDPAMSFAPVLPPPSTPMPTGPGQPAPPGQQPPPLAQPTPLPQVLAPQPVVPLQPVPPHLPPYLAPASQVGAPAQLKPLQMPQAPLQPLAQVPPQMPPIPVVPPITPLAGIDGLPPALPDLPTATVPPVPPPQYFSPAVILPSLAAPLPPASPALPLQAVKLPHPPGAPLAMPCRTIVPNAPATIPLLAVAPPGVAALSIHSAVAQLPGQPVYPAAFPQMAPTDVPPSPHHTVQNMRATPPQPALPPQPTLPPQPVLPPQPTLPPQPVLPPQPTRPPQPVLPPQPMLPPQPVLPPQPALPVRPEPLQPHLPEQAAPAATPGSQILLGHPAPYAVDVAAQVPTVPVPPAAVLSPPLPEVLLPAAPELLPQFPSSLATVSASVQSVPTQTATLLPPANPPLPGGPGIASPCPTVQLTVEPVQEEQASQDKPPGLPQSCESYGGSDVTSGKELSDSCEGAFGGGRLEGRAARKHHRRSTRARSRQERASRPRLTILNVCNTGDKMVECQLETHNHKMVTFKFDLDGDAPDEIATYMVEHDFILQAERETFIEQMKDVMDKAEDMLSEDTDADRGSDPGTSPPHLSTCGLGTGEESRQSQANAPVYQQNVLHTGKRWFIICPVAEHPAPEAPESSPPLPLSSLPPEASQDSAPYKDQLSSKEQPSFLASQQLLSQAGPSNPPGAPPAPLAPSSPPVTALPQDGAAPATSTMPEPASGTASQAGGPGTPQGLTSELETSQPLAETHEAPLAVQPLVVGLAPCTPAPEAASTRDASAPREPLPPPAPEPSPHSGTPQPALGQPAPLLPAAVGAVSLATSQLPSPPLGPTVPPQPPSALESDGEGPPPRVGFVDSTIKSLDEKLRTLLYQEHVPTSSASAGTPVEVGDRDFTLEPLRGDQPRSEVCGGDLALPPVPKEAVSGRVQLPQPLVEKSELAPTRGAVMEQGTSSSMTAESSPRSMLGYDRDGRQVASDSHVVPSVPQDVPAFVRPARVEPTDRDGGEAGESSAEPPPSDMGTVGGQASHPQTLGARALGSPRKRPEQQDVSSPAKTVGRFSVVSTQDEWTLASPHSLRYSAPPDVYLDEAPSSPDVKLAVRRAQTASSIEVGVGEPVSSDSGDEGPRARPPVQKQASLPVSGSVAGDFVKKATAFLQRPSRAGSLGPETPSRVGMKVPTISVTSFHSQSSYISSDNDSELEDADIKKELQSLREKHLKEISELQSQQKQEIEALYRRLGKPLPPNVGFFHTAPPTGRRRKTSKSKLKAGKLLNPLVRQLKVVASSTGHLADSSRGPPAKDPAQASVGLTADSTGLSGKAVQTQQPCSVRASLSSDICSGLASDGGGARGQGWTVYHPTSERVTYKSSSKPRARFLSGPVSVSIWSALKRLCLGKEHSSRSSTSSLAPGPEPGPQPALHVQAQVNNSNNKKGTFTDDLHKLVDEWTSKTVGAAQLKPTLNQLKQTQKLQDMEAQAGWAAPGEARAMTAPRAGVGMPRLPPAPGPLSTTVIPGAAPTLSVPTPDPESEKPD

SEQ ID NO: 1406 - protein, 521 aa, Homo Sapiens
MLPRRPLAWPAWLLRGAPGAAGSWGRPVGPLARRGCCSAPGTPEVPLTRERYPVRRLPFSTVSKQDLAAFERIVPGGVVTDPEALQAPNVDWLRTLRGCSKVLLRPRTSEEVSHILRHCHERNLAVNPQGGNTGMVGGSVPVFDEIILSTARMNRVLSFHSVSGILVCQAGCVLEELSRYVEERDFIMPLDLGAKGSCHIGGNVATNAGGLRFLRYGSLHGTVLGLEVVLADGTVLDCLTSLRKDNTGYDLKQLFIGSEGTLGIITTVSILCPPKPRAVNVAFLGCPGFAEVLQTFSTCKGMLGEILSAFEFMDAVCMQLVGRHLHLASPVQESPFYVLIETSGSNAGHDAEKLGHFLEHALGSGLVTDGTMATDQRKVKMLWALRERITEALSRDGYVYKYDLSLPVERLYDIVTDLRARLGPHAKHVVGYGHLGDGNLHLNVTAEAFSPSLLAALEPHVYEWTAGQQGSVSAEHGVGFRKRDVLGYSKPPGALQLMQQLKALLDPKGILNPYKTLPSQA

SEQ ID NO: 1407 - protein, 876 aa, Homo Sapiens
MGPEALSSLLLLLLVASGDADMKGHFDPAKCRYALGMQDRTIPDSDISASSSWSDSTAARHSRLESSDGDGAWCPAGSVFPKEEEYLQVDLQRLHLVALVGTQGRHAGGLGKEFSRSYRLRYSRDGRRWMGWKDRWGQEVISGNEDPEGVVLKDLGPPMVARLVRFYPRADRVMSVCLRVELYGCLWRDGLLSYTAPVGQTMYLSEAVYLNDSTYDGHTVGGLQYGGLGQLADGVVGLDDFRKSQELRVWPGYDYVGWSNHSFSSGYVEMEFEFDRLRAFQAMQVHCNNMHTLGARLPGGVECRFRRGPAMAWEGEPMRHNLGGNLGDPRARAVSVPLGGRVARFLQCRFLFAGPWLLFSEISFISDVVNNSSPALGGTFPPAPWWPPGPPPTNFSSLELEPRGQQPVAKAEGSPTAILIGCLVAIILLLLLIIALMLWRLHWRRLLSKAERRVLEEELTVHLSVPGDTILINNRPGPREPPPYQEPRPRGNPPHSAPCVPNGSAYSGDYMEPEKPGAPLLPPPPQNSVPHYAEADIVTLQGVTGGNTYAVPALPPGAVGDGPPRVDFPRSRLRFKEKLGEGQFGEVHLCEVDSPQDLVSLDFPLNVRKGHPLLVAVKILRPDATKNARNDFLKEVKIMSRLKDPNIIRLLGVCVQDDPLCMITDYMENGDLNQFLSAHQLEDKAAEGAPGDGQAAQGPTISYPMLLHVAAQIASGMRYLATLNFVHRDLATRNCLVGENFTIKIADFGMSRNLYAGDYYRVQGRAVLPIRWMAWECILMGKFTTASDVWAFGVTLWEVLMLCRAQPFGQLTDEQVIENAGEFFRDQGRQVYLSRPPACPQGLYELMLRCWSRESEQRPPFSQLHRFLAEDALNTV

SEQ ID NO: 1408 - protein, 314 aa, Homo Sapiens
MSRVPAFLSAAEVEEHLRSSSLLIPPLETALANFSSGPEGGVMQPVRTVVPVTKHRGYLGVMPAYSAAEDALTTKLVTFYEDRGITSVVPSHQATVLLFEPSNGTLLAVMDGNVITAKRTAAVSAIATKFLKPPSSEVLCILGAGVQAYSHYEIFTEQFSFKEVRIWNRTKENAEKFADTVQGEVRVCSSVQEAVAGADVIITVTLATEPILFGEWVKPGAHINAVGASRPDWRELDDELMKEAVLYVDSQEAALKESGDVLLSGAEIFAELGEVIKGVKPAHCEKTTVFKSLGMAVEDTVAAKLIYDSWSSGK

SEQ ID NO: 1409 - protein, 108 aa, Homo Sapiens
MGVQVETISPGDGRTFPKRGQTCVVHYTGMLEDGKKFDSSRDRNKPFKFMLGKQEVIRGWEEGVAQMSVGQRAKLTISPDYAYGATGHPGIIPPHATLVFDVELLKLE

SEQ ID NO: 1410 - protein, 461 aa, Homo Sapiens
MNNFGNEEFDCHFLDEGFTAKDILDQKINEVSSSDDKDAFYVADLGDILKKHLRWLKALPRVTPFYAVKCNDSKAIVKTLAATGTGFDCASKTEIQLVQSLGVPPERIIYANPCKQVSQIKYAANNGVQMMTFDSEVELMKVARAHPKAKLVLRIATDDSKAVCRLSVKFGATLRTSRLLLERAKELNIDVVGVSFHVGSGCTDPETFVQAISDARCVFDMGAEVGFSMYLLDIGGGFPGSEDVKLKFEEITGVINPALDKYFPSDSGVRIIAEPGRYYVASAFTLAVNIIAKKIVLKEQTGSDDEDESSEQTFMYYVNDGVYGSFNCILYDHAHVKPLLQKRPKPDEKYYSSSIWGPTCDGLDRIVERCDLPEMHVGDWMLFENMGAYTVAAASTFNGFQRPTIYYVMSGPAWQLMQQFQNPDFPPEVEEQDASTLPVSCAWESGMKRHRAACASASINV

SEQ ID NO: 1411 - protein, 156 aa, Homo Sapiens
MPMAGLLKGLVRQLERFSVQQQASKMPPKGKSGSGKAGKGGAASGSDSADKKAQGPKGGGNAVKVRHILCEKHGKIMEAMEKLKSGMRFNEVAAQYSEDKARQGGDLGWMTRGSMVGPFQEAAFALPVSGMDKPVFTDPPVKTKFGYHIIMVEGRK

SEQ ID NO: 1412 - protein, 385 aa, Homo Sapiens
MPKKLLLLPPPSASSAFRVPRARPVPPPAMNAARTGYRVFSANSTAACTELAKRITERLGAELGKSVVYQETNGETRVEIKESVRGQDIFIIQTIPRDVNTAVMELLIMAYALKTACARNIIGVIPYFPYSKQSKMRKRGSIVCKLLASMLAKAGLTHIITMDLHQKEIQGFFSFPVDNLRASPFLLQYIQEEIPNYRNAVIVAKSPDAAKRAQSYAERLRLGLAVIHGEAQCTELDMDDGRHSPPMVKNATVHPGLELPLMMAKEKPPITVVGDVGGRIAIIVDDIIDDVESFVAAAEILKERGAYKIYVMATHGILSAEAPRLIEESSVDEVVVTNTVPHEVQKLQCPKIKTVDISLILSEAIRRIHNGESMAYLFRNITVDD

SEQ ID NO: 1413 - protein, 115 aa, Homo Sapiens
MRYVASYLLAALGGNSSPSAKDIKKILDSVGIEADDDRLNKVISELNGKNIEDVIAQGIGKLASVPAGGAVAVSAAPGSAAPAAGSAPAAAEEKKDEKKEESEESDDDMGFGLFD

SEQ ID NO: 1414 - protein, 84 aa, Homo Sapiens
MPLAKDLLHPSPEEEKRKHKKKRLVQSPNSYFMDVKCPGCYKITTVFSHAQTVVLCVGCSTVLCQPTGGKARLTEGCSFRRKQH

SEQ ID NO: 1415 - protein, 101 aa, Homo Sapiens
MSDQEAKPSTEDLGDKKEGEYIKLKVIGQDSSEIHFKVKMTTHLKKLKESYCQRQGVPMNSLRFLFEGQRIADNHTPKELGMEEEDVIEVYQEQTGGHSTV

SEQ ID NO: 1416 - protein, 862 aa, Homo Sapiens
MNIQEQGFPLDLGASFTEDAPRPPVPGEEGELVSTDPRPASYSFCSGKGVGIKGETSTATPRRSDLDLGYEPEGSASPTPPYLKWAESLHSLLDDQDGISLFRTFLKQEGCADLLDFWFACTGFRKLEPCDSNEEKRLKLARAIYRKYILDNNGIVSRQTKPATKSFIKGCIMKQLIDPAMFDQAQTEIQATMEENTYPSFLKSDIYLEYTRTGSESPKVCSDQSSGSGTGKGISGYLPTLNEDEEWKCDQDMDEDDGRDAAPPGRLPQKLLLETAAPRVSSSRRYSEGREFRYGSWREPVNPYYVNAGYALAPATSANDSEQQSLSSDADTLSLTDSSVDGIPPYRIRKQHRREMQESVQVNGRVPLPHIPRTYRVPKEVRVEPQKFAEELIHRLEAVQRTREAEEKLEERLKRVRMEEEGEDGDPSSGPPGPCHKLPPAPAWHHFPPRCVDMGCAGLRDAHEENPESILDEHVQRVLRTPGRQSPGPGHRSPDSGHVAKMPVALGGAASGHGKHVPKSGAKLDAAGLHHHRHVHHHVHHSTARPKEQVEAEATRRAQSSFAWGLEPHSHGARSRGYSESVGAAPNASDGLAHSGKVGVACKRNAKKAESGKSASTEVPGASEDAEKNQKIMQWIIEGEKEISRHRRTGHGSSGTRKPQPHENSRPLSLEHPWAGPQLRTSVQPSHLFIQDPTMPPHPAPNPLTQLEEARRRLEEEEKRASRAPSKQRYVQEVMRRGRACVRPACAPVLHVVPAVSDMELSETETRSQRKVGGGSAQPCDSIVVAYYFCGEPIPYRTLVRGRAVTLGQFKELLTKKGSYRYYFKKVSDEFDCGVVFEEVREDEAVLPVFEEKIIGKVEKVD

SEQ ID NO: 1417 - protein, 220 aa, Homo Sapiens
MASAGMQILGVVLTLLGWVNGLVSCALPMWKVTAFIGNSIVVAQVVWEGLWMSCVVQSTGQMQCKVYDSLLALPQDLQAARALCVIALLVALFGLLVYLAGAKCTTCVEEKDSKARLVLTSGIVFVISGVLTLIPVCWTAHAIIRDFYNPLVAEAQKRELGASLYLGWAASGLLLLGGGLLCCTCPSGGSQGPSHYMARYSTSAPAISRGPSEYPTKNYV

SEQ ID NO: 1418 - protein, 818 aa, Homo Sapiens
MKKQFNRMRQLANQTVGRAEKTEVLSEDLLQVEKRLELVKQVSHSTHKKLTACLQGQQGAEADKRSKKLPLTTLAQCLMEGSAILGDDTLLGKMLKLCGETEDKLAQELIHFELQVERDVIEPLFLLAEVEIPNIQKQRKHLAKLVLDMDSSRTRWQQTSKSSGLSSSLQPAGAKADALREEMEEAANRVEICRDQLSADMYSFVAKEIDYANYFQTLIEVQAEYHRKSLTLLQAVLPQIKAQQEAWVEKPSFGKPLEEHLTISGREIAFPIEACVTMLLECGMQEEGLFRVAPSASKLKKLKAALDCCVVDVQEYSADPHAIAGALKSYLRELPEPLMTFELYDEWIQASNVQEQDKKLQALWNACEKLPKANHNNIRYLIKFLSKLSEYQDVNKMTPSNMAIVLGPNLLWPQAEGNITEMMTTVSLQIVGIIEPIIQHADWFFPGEIEFNITGNYGSPVHVNHNANYSSMPSPDMDPADRRQPEQARRPLSVATDNMMLEFYKKDGLRKIQSMGVRVMDTNWVARRGSSAGRKVSCAPPSMQPPAPPAELAAPLPSPLPEQPLDSPAAPALSPSGLGLQPGPERTSTTKSKELSPGSAQKGSPGSSQGTACAGTQPGAQPGAQPGASPSPSQPPADQSPHTLRKVSKKLAPIPPKVPFGQPGAMADQSAGQPSPVSLSPTPPSTPSPYGLSYPQGYSLASGQLSPAAAPPLASPSVFTSTLSKSRPTPKPRQRPTLPPPQPPTVNLSASSPQSTEAPMLDGMSPGESMSTDLVHFDIPSIHIELGSTLRLSPLEHMRRHSVTDKRDSEEESESTAL

SEQ ID NO: 1419 - protein, 370 aa, Homo Sapiens
MSLHQFLLEPITCHAWNRDRTQIALSPNNHEVHIYKKNGSQWVKAHELKEHNGHITGIDWAPKSDRIVTCGADRNAYVWSQKDGVWKPTLVILRINRAATFVKWSPLENKFAVGSGARLISVCYFESENDWWVSKHIKKPIRSTVLSLDWHPNNVLLAAGSCDFKCRVFSAYIKEVDEKPASTPWGSKMPFGQLMSEFGGSGTGGWVHGVSFSASGSRLAWVSHDSTVSVADASKSVQVSTLKTEFLPLLSVSFVSENSVVAAGHDCCPMLFNYDDRGCLTFVSKLDIPKQSIQRNMSAMERFRNMDKRATTEDRNTALETLHQNSITQVSIYEVDKQDCRKFCTTGIDGAMTIWDFKTLESSIQGLRIM

SEQ ID NO: 1420 - protein, 501 aa, Homo Sapiens
METILEQQRRYHEEKERLMDVMAKEMLTKKSTLRDQINSDHRTRAMQDRYMEVSGNLRDLYDDKDGLRKEELNAISGPNEFAEFYNRLKQIKEFHRKHPNEICVPMSVEFEELLKARENPSEEAQNLVEFTDEEGYGRYLDLHDCYLKYINLKASEKLDYITYLSIFDQLFDIPKERKNAEYKRYLEMLLEYLQDYTDRVKPLQDQNELFGKIQAEFEKKWENGTFPGWPKETSSALTHAGAHLDLSAFSSWEELASLGLDRLKSALLALGLKCGGTLEERAQRLFSTKGKSLESLDTSLFAKNPKSKGTKRDTERNKDIAFLEAQIYEYVEILGEQRHLTHENVQRKQARTGEEREEEEEEQISESESEDEENEIIYNPKNLPLGWDGKPIPYWLYKLHGLNINYNCEICGNYTYRGPKAFQRHFAEWRHAHGMRCLGIPNTAHFANVTQIEDAVSLWAKLKLQKASERWQPDTEEEYEDSSGNVVNKKTYEDLKRQGLL

SEQ ID NO: 1421 - protein, 172 aa, Homo Sapiens
MSSSGGAPGASASSAPPAQEEGMTWWYRWLCRLSGVLGAVSCAISGLFNCITIHPLNIAAGVWMIMNAFILLLCEAPFCCQFIEFANTVAEKVDRLRSWQKAVFYCGMAVVPIVISLTLTTLLGNAIAFATGVLYGLSALGKKGDAISYARIQQQRQQADEEKLAETLEGEL

SEQ ID NO: 1422 - protein, 1469 aa, Homo Sapiens
MARLAAVLWNLCVTAVLVTSATQGLSRAGLPFGLMRRELACEGYPIELRCPGSDVIMVENANYGRTDDKICDADPFQMENVQCYLPDAFKIMSQRCNNRTQCVVVAGSDAFPDPCPGTYKYLEVQYDCVPYIFVCPGTLQKVLEPTSTHESEHQSGAWCKDPLQAGDRIYVMPWIPYRTDTLTEYASWEDYVAARHTTTYRLPNRVDGTGFVVYDGAVFYNKERTRNIVKYDLRTRIKSGETVINTANYHDTSPYRWGGKTDIDLAVDENGLWVIYATEGNNGRLVVSQLNPYTLRFEGTWETGYDKRSASNAFMVCGVLYVLRSVYVDDDSEAAGNRVDYAFNTNANREEPVSLTFPNPYQFISSVDYNPRDNQLYVWNNYFVVRYSLEFGPPDPSAGPATSPPLSTTTTARPTPLTSTASPAATTPLRRAPLTTHPVGAINQLGPDLPPATAPVPSTRRPPAPNLHVSPELFCEPREVRRVQWPATQQGMLVERPCPKGTRGIASFQCLPALGLWNPRGPDLSNCTSPWVNQVAQKIKSGENAANIASELARHTRGSIYAGDVSSSVKLMEQLLDILDAQLQALRPIERESAGKNYNKMHKRERTCKDYIKAVVETVDNLLRPEALESWKDMNATEQVHTATMLLDVLEEGAFLLADNVREPARFLAAKENVVLEVTVLNTEGQVQELVFPQEEYPRKNSIQLSAKTIKQNSRNGVVKVVFILYNNLGLFLSTENATVKLAGEAGPGGPGGASLVVNSQVIAASINKESSRVFLMDPVIFTVAHLEDKNHFNANCSFWNYSERSMLGYWSTQGCRLVESNKTHTTCACSHLTNFAVLMAHREIYQGRINELLLSVITWVGIVISLVCLAICISTFCFLRGLQTDRNTIHKNLCINLFLAELLFLVGIDKTQYEIACPIFAGLLHYFFLAAFSWLCLEGVHLYLLLVEVFESEYSRTKYYYLGGYCFPALVVGIAAAIDYRSYGTEKACWLRVDNYFIWSFIGPVSFVIVVNLVFLMVTLHKMIRSSSVLKPDSSRLDNIKSWALGAIALLFLLGLTWAFGLLFINKESVVMAYLFTTFNAFQGVFIFVFHCALQKKVHKEYSKCLRHSYCCIRSPPGGTHGSLKTSAMRSNTRYYTGTQSRIRRMWNDTVRKQTESSFMAGDINSTPTLNRGTMGNHLLTNPVLQPRGGTSPYNTLIAESVGFNPSSPPVFNSPGSYREPKHPLGGREACGMDTLPLNGNFNNSYSLRSGDFPPGDGGPEPPRGRNLADAAAFEKMIISELVHNNLRGSSSAAKGPPPPEPPVPPVPGGGGEEEAGGPGGADRAEIELLYKALEEPLLLPRAQSVLYQSDLDESESCTAEDGATSRPLSSPPGRDSLYASGANLRDSPSYPDSSPEGPSEALPPPPPAPPGPPEIYYTSRPPALVARNPLQGYYQVRRPSHEGYLAAPGLEGPGPDGDGQMQLVTSL

SEQ ID NO: 1423 - protein, 203 aa, Homo Sapiens [sequence omitted]

SEQ ID NO: 1424 - protein, 294 aa, Homo Sapiens
MEYPAPATVQAADGGAAGPYSSSELLEGQEPDGVRFDRERARRLWEAVSGAQPVGREEVEHMIQKNQCLFTNTQCKVCCALLISESQKLAHYQSKKHANKVKRYLAIHGMETLKGETKKLDSDQKSSRSKDKNQCCPICNMTFSSPVVAQSHYLGKTHAKNLKLKQQSTKVEALHQNREMIDPDKFCSLCHATFNDPVMAQQHYVGKKHRKQETKLKLMARYGRLADPAVTDFPAGKGYPCKTCKIVLNSIEQYQAHVSGFKHKNQSPKTVASSLGQIPMQRQPIQKDSTTLED

SEQ ID NO: 1425 - protein, 187 aa, Homo Sapiens
MSEMAELSELYEESSDLQMDVMPGEGDLPQMEVGSGSRELSLRPSRSGAQQLEEEGPMEEEEAQPMAAPEGKRSLANGPNAGEQPGQVAGADFESEDEGEEFDDWEDDYDYPEEEQLSGAGYRVSAALEEADKMFLRTREPALDGGFQMHYEKTPFDQLAFIEELFSLMVVNRLTEELGCDEIIDRE

SEQ ID NO: 1426 - protein, 618 aa, Homo Sapiens
MELLAAAFSAACAVDHDSSTSESDARDSAAGHLPGSESSSTPGNGATPEEWPALADSPTTLTEALRMIHPIPADSWRNLIEQIGLLYQEYRDKSTLQEIETRRQQDAEIEDNTNGSPASEDTPEEEEEEEEEEEPASPPERKTLPQICLLSNPHSRFNLWQDLPEIRSSGVLEILQPEEIKLQEAMFELVTSEASYYKSLNLLVSHFMENERIRKILHPSEAHILFSNVLDVLAVSERFLLELEHRMEENIVISDVCDIVYRYAADHFSVYITYVSNQTYQERTYKQLLQEKAAFRELIAQLELDPKCRGLPFSSFLILPFQRITRLKLLVQNILKRVEERSERECTALDAHKELEMVVKACNEGVRKMSRTEQMISIQKKMEFKIKSVPIISHSRWLLKQGELQQMSGPKTSRTLRTKKLFHEIYLFLFNDLLVICRQIPGDKYQVFDSAPRGLLRVEELEDQGQTLANVFILRLLENADDREATYMLKASSQSEMKRWMTSLAPNRRTKFVSFTSRLLDCPQVQCVHPYVAQQPDELTLELADILNILDKTDDGWIFGERLHDQERGWFPSSMTEEILNPKIRSQNLKECFRVHKMDDPQRSQNKDRRKLGSRNRQ

SEQ ID NO: 1427 - protein, 226 aa, Homo Sapiens
METVVIVAIGVLATIFLASFAALVLVCRQRYCRPRDLLQRYDSKPIVDLIGAMETQSEPSELELDDVVITNPHIEAILENEDWIEDASGLMSHCIAILKICHTLTEKLVAMTMGSGAKMKTSASVSDIIVVAKRISPRVDDVVKSMYPPLDPKLLDARTTALLLSVSHLVLVTRNACHLTGGLDWIDQSLSAAEEHLEVLREAALASEPDKGLPGPEGFLQEQSAI

SEQ ID NO: 1428 - protein, 971 aa, Homo Sapiens
MSNVSEERRKRQQNIKEGLQFIQSPLSYPGTQEQYAVYLRALVRNLFNEGNDVYREHDWNNSISQYTEALNIADYAKSEEILIPKEIIEKLYINRIACYSNMGFHDKVLEDCNIVLSLNASNCKALYRKSKALSDLGRYKKAYDAVAKCSLAVPQDEHVIKLTQELAQKLGFKIRKAYVRAELSLKSVPGDGATKALNHSVEDIEPDLLTPRQEAVPVVSLPAPSFSHEVGSELASVPVMPLTSILPLQVEESALPSAVLANGGKMPFTMPEAFLDDGDMVLGDELDDLLDSAPETNETVMPSALVRGPLQTASVSPSMPFSASLLGTLPIGARYAPPPSFSEFYPPLTSSLEDFCSSLNSFSMSESKRDLSTSTSREGTPLNNSNSSLLLMNGPGSLFASENFLGISSQPRNDFGNFFGSAVTKPSSSVTPRHPLEGTHELRQACQICFVKSGPKLMDFTYHANIDHKCKKDILIGRIKNVEDKSWKKIRPRPTKTNYEGPYYICKDVAAEEECRYSGHCTFAYCQEEIDVWTLERKGAFSREAFFGGNGKINLTVFKLLQEHLGEFIFLCEKCFDHKPRMISKRNKDNSTACSHPVTKHEFEDNKCLVHILRETTVKYSKIRSFHGQCQLDLCRHEVRYGCLREDECFYAHSLVELKVWIMQNETGISHDAIAQESKRYWQNLEANVPGAQVLGNQIMPGFLNMKIKFVCAQCLRNGQVIEPDKNRKYCSAKARHSWTKDRRAMRVMSIERKKWMNIRPLPTKKQMPLQFDLCNHIASGKKCQYVGNCSFAHSPEEREVWTYMKENGIQDMEQFYELWLKSQKNEKSEDIASQSNKENGKQIHMPTDYAEVTVDFHCWMCGKNCNSEKQWQGHISSEKHKEKVFHTEDDQYCWQHRFPTGYFSICDRYMNGTCPEGNSCKFAHGNAELHEWEERRDALKMKLNKARKDHLIGPNDNDFGKYSFLFKDLN

SEQ ID NO: 1429 - protein, 183 aa, Homo Sapiens
MEQRLAEFRAARKRAGLAAQPPAASQGAQTPGEKAEAAATLKAAPGWLKRFLVWKPRPASARAQPGLVQEAAQPQGSTSETPWNTAIPLPSCWDQSFLTNITFLKVLLWLVLLGLFVELEFGLAYFVLSLFYWMYVGTRGPEEKKEGEKSAYSVFNPGCEAIQGTLTAEQLERELQLRPLAGR

SEQ ID NO: 1430 - protein, 201 aa, Homo Sapiens
MAMHNKAAPPQIPDTRRELAELVKRKQELAETLANLERQIYAFEGSYLEDTQMYGNIIRGWDRYLTNQKNSNSKNDRRNRKFKEAERLFSKSSVTSAAAVSALAGVQDQLIEKREPGSGTESDTSPDFHNQENEPSQEDPEDLDGSVQGVKPQKAASSTSSGSHHSSHKKRKNKNRHSPSGMFDYDFEIDLKLNKKPRADY

SEQ ID NO: 1431 - protein, 125 aa, Homo Sapiens
MPRYELALILKAMQRPETAATLKRTIEALMDRGAIVRDLENLGERALPYRISAHSQQHNRGGYFLVDFYAPTAAVESMVEHLSRDIDVIRGNIVKHPLTQELKECEGIVPVPLAEKLYSTKKRKK

SEQ ID NO: 1432 - protein, 490 aa, Homo Sapiens
MTSRASELSPGRSVTAGIIIVGDEILKGHTQDTNTFFLCRTLRSLGVQVCRVSVVPDEVATIAAEVTSFSNRFTHVLTAGGIGPTHDDVTFEAVAQAFGDELKPHPKLEAATKALGGEGWEKLSLVPSSARLHYGTDPCTGQPFRFPLVSVRNVYLFPGIPELLRRVLEGMKGLFQNPAVQFHSKELYVAADEASIAPILAEAQAHFGRRLGLGSYPDWGSNYYQVKLTLDSEEEGPLEECLAYLTARLPQGSLVPYMPNAVEQASEAVYKLAESGSSLGKKVAGALQTIETSLAQYSLTQLCVGFNGGKDCTALLHLFHAAVQRKLPDVPNPLQILYIRSISPFPELEQFLQDTIKRYNLQMLEAEGSMKQALGELQARHPQLEAVLMGTRRTDPYSCSLCPFSPTDPGWPAFMRINPLLDWTYRDIWDFLRQLFVPYCILYDRGYTSLGSRENTVRNPALKCLSPGGHPTYRPAYLLENEEEERNSRT

SEQ ID NO: 1433 - protein, 194 aa, Homo Sapiens
MAKQKRKVPEVTEKKNKKLKKASAEGPLLGPEAAPSGEGAGSKGEAVLRPGLDAEPELSPEEQRVLERKLKKERKKEERQRLREAGLVAQHPPARRSGAELALDYLCRWAQKHKNWRFQKTRQTWLLLHMYDSDKVPDEHFSTLLAYLEGLQGRARELTVQKAEALMRELDEEGSDPPLPGRAQRIRQVLQLLS

SEQ ID NO: 1434 - protein, 200 aa, Homo Sapiens
MEQTEVLKPRTLADLIRILHQLFAGDEVNVEEVQAIMEAYESDPTEWAMYAKFDQYRYTRNLVDQGNGKFNLMILCWGEGHGSSIHDHTNSHCFLKMLQGNLKETLFAWPDKKSNEMVKKSERVLRENQCAYINDSIGLHRVENISHTEPAVSLHLYSPPFDTCHAFDQRTGHKNKVTMTFHSKFGIRTPNATSGSLENN

SEQ ID NO: 1435 - protein, 1190 aa, Homo Sapiens
MKTRQNKDSMSMRSGRKKEAPGPREELRSRGRASPGGVSTSSSDGKAEKSRQTAKKARVEEASTPKVNKQGRSEEISESESEETNAPKKTKTEQELPRPQSPSDLDSLDGRSLNDDGSSDPRDIDQDNRSTSPSIYSPGSVENDSDSSSGLSQGPARPYHPPPLFPPSPQPPDSTPRQPEASFEPHPSVTPTGYHAPMEPPTSRMFQAPPGAPPPHPQLYPGGTGGVLSGPPMGPKGGGAASSVGGPNGGKQHPPPTTPISVSSSGASGAPPTKPPTTPVGGGNLPSAPPPANFPHVTPNLPPPPALRPLNNASASPPGLGAQPLPGHLPSPHAMGQGMGGLPPGPEKGPTLAPSPHSLPPASSSAPAPPMRFPYSSSSSSSAAASSSSSSSSSSASPFPASQALPSYPHSFPPPTSLSVSNQPPKYTQPSLPSQAVWSQGPPPPPPYGRLLANSNAHPGPFPPSTGAQSTAHPPVSTHHHHHQQQQQQQQQQQQQQQQQQQHHGNSGPPPPGAFPHPLEGGSSHHAHPYAMSPSLGSLRPYPPGPAHLPPPHSQVSYSQAGPNGPPVSSSSNSSSSTSQGSYPCSHPSPSQGPQGAPYPFPPVPTVTTSSATLSTVIATVASSPAGYKTASPPGPPPYGKRAPSPGAYKTATPPGYKPGSPPSFRTGTPPGYRGTSPPAGPGTFKPGSPTVGPGPLPPAGPSGLPSLPPPPAAPASGPPLSATQIKQEPAEEYETPESPVPPARSPSPPPKVVDVPSHASQSARFNKHLDRGFNSCARSDLYFVPLEGSKLAKKRADLVEKVRREAEQRAREEKEREREREREKEREREKERELERSVKLAQEGRAPVECPSLGPVPHRPPFEPGSAVATVPPYLGPDTPALRTLSEYARPHVMSPGNRNHPFYVPLGAVDPGLLGYNVPALYSSDPAAREREREARERDLRDRLKPGFEVKPSELEPLHGVPGPGLDPFPRHGGLALQPGPPGLHPFPFHPSLGPLERERLALAAGPALRPDMSYAERLAAERQHAERVAALGNDPLARLQMLNVTPHHHQHSHIHSHLHLHQQDAIHAASASVHPLIDPLASGSHLTRIPYPAGTLPNPLLPHPLHENEVLRHQLFAAPYRDLPASLSAPMSAAHQLQAMHAQSAELQRLALEQQQWLHAHHPLHSVPLPAQEDYYSHLKKESDKPL

SEQ ID NO: 1436 - protein, 290 aa, Homo Sapiens
MAALRVLLSCVRGPLRPPVRCPAWRPFASGANFEYIIAEKRGKNNTVGLIQLNRPKALNALCDGLIDELNQALKTFEEDPAVGAIVLTGGDKAFAAGADIKEMQNLSFQDCYSSKFLKHWDHLTQVKKPVIAAVNGYAFGGGCELAMMCDIIYAGEKAQFAQPEILIGTIPGAGGTQRLTRAVGKSLAMEMVLTGDRISAQDAKQAGLVSKICPVETLVEEAIQCAEKIASNSKIVVAMAKESVNAAFEMTLTEGSKLEKKLFYSTFATDDRKEGMTAFVEKRKANFKDQ

SEQ ID NO: 1437 - protein, 2639 aa, Homo Sapiens
MSSSHSRAGQSAAGAAPGGGVDTRDAEMPATEKDLAEDAPWKKIQQNTFTRWCNEHLKCVSKRIANLQTDLSDGLRLIALLEVLSQKKMHRKHNQRPTFRQMQLENVSVALEFLDRESIKLVSIDSKAIVDGNLKLILGLIWTLILHYSISMPMWDEEEDEEAKKQTPKQRLLGWIQNKLPQLPITNFSRDWQSGRALGALVDSCAPGLCPDWDSWDASKPVTNAREAMQQADDWLGIPQVITPEEIVDPNVDEHSVMTYLSQFPKAKLKPGAPLRPKLNPKKARAYGPGIEPTGNMVKKRAEFTVETRSAGQGEVLVYVEDPAGHQEEAKVTANNDKNRTFSVWYVPEVTGTHKVTVLFAGQHIAKSPFEVYVDKSQGDASKVTAQGPGLEPSGNIANKTTYFEIFTAGAGTGEVEVVIQDPMGQKGTVEPQLEARGDSTYRCSYQPTMEGVHTVHVTFAGVPIPRSPYTVTVGQACNPSACRAVGRGLQPKGVRVKETADFKVYTKGAGSGELKVTVKGPKGEERVKQKDLGDGVYGFEYYPMVPGTYIVTITWGGQNIGRSPFEVKVGTECGNQKVRAWGPGLEGGVVGKSADFVVEAIGDDVGTLGFSVEGPSQAKIECDDKGDGSCDVRYWPQEAGEYAVHVLCNSEDIRLSPFMADIRDAPQDFHPDRVKARGPGLEKTGVAVNKPAEFTVDAKHGGKAPLRVQVQDNEGCPVEALVKDNGNGTYSCSYVPRKPVKHTAMVSWGGVSIPNSPFRVNVGAGSHPNKVKVYGPGVAKTGLKAHEPTYFTVDCAEAGQGDVSIGIKCAPGVVGPAEADIDFDIIRNDNDTFTVKYTPRGAGSYTIMVLFADQATPTSPIRVKVEPSHDASKVKAEGPGLSRTGVELGKPTHFTVNAKAAGKGKLDVQFSGLTKGDAVRDVDIIDHHDNTYTVKYTPVQQGPVGVNVTYGGDPIPKSPFSVAVSPSLDLSKIKVSGLGEKVDVGKDQEFTVKSKGAGGQGKVASKIVGPSGAAVPCKVEPGLGADNSVVRFLPREEGPYEVEVTYDGVPVPGSPFPLEAVAPTKPSKVKAFGPGLQGGSAGSPARFTIDTKGAGTGGLGLTVEGPCEAQLECLDNGDGTCSVSYVPTEPGDYNINILFADTHIPGSPFKAHVVPCFDASKVKCSGPGLERATAGEVGQFQVDCSSAGSAELTIEICSEAGLPAEVYIQDHGDGTHTITYIPLCPGAYTVTIKYGGQPVPNFPSKLQVEPAVDTSGVQCYGPGIEGQGVFREATTEFSVDARALTQTGGPHVKARVANPSGNLTETYVQDRGDGMYKVEYTPYEEGLHSVDVTYDGSPVPSSPFQVPVTEGCDPSRVRVHGPGIQSGTTNKPNKFTVETRGAGTGGLGLAVEGPSEAKMSCMDNKDGSCSVEYIPYEAGTYSLNVTYGGHQVPGSPFKVPVHDVTDASKVKCSGPGLSPGMVRANLPQSFQVDTSKAGVAPLQVKVQGPKGLVEPVDVVDNADGTQTVNYVPSREGPYSISVLYGDEEVPRSPFKVKVLPTHDASKVKASGPGLNTTGVPASLPVEFTIDAKDAGEGLLAVQITDPEGKPKKTHIQDNHDGTYTVAYVPDVTGRYTILIKYGGDEIPFSPYRVRAVPTGDASKCTVTGAGIGPTIQIGEETVITVDTKAAGKGKVTCTVCTPDGSEVDVDVVENEDGTFDIFYTAPQPGKYVICVRFGGEHVPNSPFQVTALAGDQPSVQPPLRSQQLAPQYTYAQGGQQTWAPERPLVGVNGLDVTSLRPFDLVIPFTIKKGEITGEVRMPSGKVAQPTITDNKDGTVTVRYAPSEAGLHEMDIRYDNMHIPGSPLQFYVDYVNCGHVTAYGPGLTHGVVNKPATFTVNTKDAGEGGLSLAIEGPSKAEISCTDNQDGTCSVSYLPVLPGDYSILVKYNEQHVPGSPFTARVTGDDSMRMSHLKVGSAADIPINISETDLSLLTATVVPPSGREEPCLLKRLRNGHVGISFVPKETGEHLVHVKKNGQHVASSPIPVVISQSEIGDASRVRVSGQGLHEGHTFEPAEFIIDTRDAGYGGLSLSIEGPSKVDINTEDLEDGTCRVTYCPTEPGNYIINIKFADQHVPGSPFSVKVTGEGRVKESITRRRRAPSVANVGSHCDLSLKIPEISIQDMTAQVTSPSGKTHEAEIVEGENHTYCIRFVPAEMGTHTVSVKYKGQHVPGSPFQFTVGPLGEGGAHKVRAGGPGLERAEAGVPAEFSIWTREAGAGGLAIAVEGPSKAEISFEDRKDGSCGVAYVVQEPGDYEVSVKFNEEHIPDSPFVVPVASPSGDARRLTVSSLQESGLKVNQPASFAVSLNGAKGAIDAKVHSPSGALEECYVTEIDQDKYAVRFIPRENGVYLIDVKFNGTHIPGSPFKIRVGEPGHGGDPGLVSAYGAGLEGGVTGNPAEFVVNTSNAGAGALSVTIDGPSKVKMDCQECPEGYRVTYTPMAPGSYLISIKYGGPYHIGGSPFKAKVTGPRLVSNHSLHETSSVFVDSLTKATCAPQHGAPGPGPADASKVVAKGLGLSKAYVGQKSSFTVDCSKAGNNMLLVGVHGPRTPCEEILVKHVGSRLYSVSYLLKDKGEYTLVVKWGDEHIPGSPYRVVVP

SEQ ID NO: 1438 - protein, 731 aa, Homo Sapiens
MVVEHPEFLKAGKEPGLQIWRVEKFDLVPVPTNLYGDFFTGDAYVILKTVQLRNGNLQYDLHYWLGNECSQDESGAAAIFTVQLDDYLNGRAVQHREVQGFESATFLGYFKSGLKYKKGGVASGFKHVVPNEVVVQRLFQVKGRRVVRATEVPVSWESFNNGDCFILDLGNNIHQWCGSNSNRYERLKATQVSKGIRDNERSGRARVHVSEEGTEPEAMLQVLGPKPALPAGTEDTAKEDAANRKLAKLYKVSNGAGTMSVSLVADENPFAQGALKSEDCFILDHGKDGKIFVWKGKQANTEERKAALKTASDFITKMDYPKQTQVSVLPEGGETPLFKQFFKNWRDPDQTDGLGLSYLSSHIANVERVPFDAATLHTSTAMAAQHGMDDDGTGQKQIWRIEGSNKVPVDPATYGQFYGGDSYIILYNYRHGGRQGQIIYNWQGAQSTQDEVAASAILTAQLDEELGGTPVQSRVVQGKEPAHLMSLFGGKPMIIYKGGTSREGGQTAPASTRLFQVRANSAGATRAVEVLPKAGALNSNDAFVLKTPSAAYLWVGTGASEAEKTGAQELLRVLRAQPVQVAEGSEPDGFWEALGGKAAYRTSPRLKDKKMDAHPPRLFACSNKIGRFVIEEVPGELMQEDLATDDVMLLDTWDQVFVWVGKDSQEEEKTEALTSAKRYIETDPANRDRRTPITVVKQGFEPPSFVGWFLGWDDDYWSVDPLDRAMAELAA

SEQ ID NO: 1439 - protein, 397 aa, Homo Sapiens
MVKETTYYDVLGVKPNATQEELKKAYRKLALKYHPDKNPNEGEKFKQISQAYEVLSDAKKRELYDKGGEQAIKEGGAGGGFGSPMDIFDMFFGGGGRMQRERRGKNVVHQLSVTLEDLYNGATRKLALQKNVICDKCEGRGGKKGAVECCPNCRGTGMQIRIHQIGPGMVQQIQSVCMECQGHGERISPKDRCKSCNGRKIVREKKILEVHIDKGMKDGQKITFHGEGDQEPGLEPGDIIIVLDQKDHAVFTRRGEDLFMCMDIQLVEALCGFQKPISTLDNRTIVITSHPGQIVKHGDIKCVLNEGMPIYRRPYEKGRLIIEFKVNFPENGFLSPDKLSLLEKLLPERKEVEETDEMDQVELVDFDPNQERRRHYNGEAYEDDEHHPRGGVQCQTS

SEQ ID NO: 1440 - protein, 529 aa, Homo Sapiens [sequence omitted]

SEQ ID NO: 1441 - protein, 357 aa, Homo Sapiens
MAPRRVRSFLRGLPALLLLLLFLGPWPAASHGGKYSREKNQPKPSPKRESGEEFRMEKLNQLWEKAQRLHLPPVRLAELHADLKIQERDELAWKKLKLDGLDEDGEKEARLIRNLNVILAKYGLDGKKDARQVTSNSLSGTQEDGLDDPRLEKLWHKAKTSGKFSGEELDKLWREFLHHKEKVHEYNVLLETLSRTEEIHENVISPSDLSDIKGSVLHSRHTELKEKLRSINQGLDRLRRVSHQGYSTEAEFEEPRVIDLWDLAQSANLTDKELEAFREELKHFEAKIEKHNHYQKQLEIAHEKLRHAESVGDGERVSRSREKHALLEGRTKELGYTVKKHLQDLSGRISRARHNEL

SEQ ID NO: 1442 - protein, 343 aa, Homo Sapiens
MEVLAAETTSQQERLQAIAEKRKRQAEIENKRRQLEDERRQLQHLKSKALRERWLLEGTPSSASEGDEDLRRQMQDDEQKTRLLEDSVSRLEKEIEVLERGDSAPATAKENAAAPSPVRAPAPSPAKEERKTEVVMNSQQTPVGTPKDKRVSNTPLRTVDGSPMMKAVVHAVDGTAENGIHPLSSSEVDELIHKADEVTLSEAGSTAGAAETRGAVEGAARTTPSRREITGVQAQPGEATSGPPGIQPGQEPPVTMIFMGYQNVEDEAETKKVLGLQDTITAELVVIEDAAEPKEPAPPNGSAAEPPTEAASREENQAGPEATTSDPQDLDMKKHRCKCCSIM

SEQ ID NO: 1443 - protein, 196 aa, Homo Sapiens
MDDTLFQLKFTAKQLEKLAKKAEKDSKAEQAKVKKALLQKNVECARVYAENAIRKKNEGVNWLRMASRVDAVASKVQTAVTMKGVTKNMAQVTKALDKALSTMDLQKVSSVMDRFEQQVQNLDVHTSVMEDSMSSATTLTTPQEQVDSLIMQIAEENGLEVLDQLSQLPEGASAVGESSVRSQEDQLSRRLAALRN

SEQ ID NO: 1444 - protein, 738 aa, Homo Sapiens
MQPRWAQGATMWLGVLLTLLLCSSLEGQENSFTINSVDMKSLPDWTVQNGKNLTLQCFADVSTTSHVKPQHQMLFYKDDVLFYNISSMKSTESYFIPEVRIYDSGTYKCTVIVNNKEKTTAEYQVLVEGVPSPRVTLDKKEAIQGGIVRVNCSVPEEKAPIHFTIEKLELNEKMVKLKREKNSRDQNFVILEFPVEEQDRVLSFRCQARIISGIHMQTSESTKSELVTVTESFSTPKFHISPTGMIMEGAQLHIKCTIQVTHLAQEFPEIIIQKDKAIVAHNRHGNKAVYSVMAMVEHSGNYTCKVESSRISKVSSIVVNITELFSKPELESSFTHLDQGERLNLSCSIPGAPPANFTIQKEDTIVSQTQDFTKIASKSDSGTYICTAGIDKVVKKSNTVQIVVCEMLSQPRISYDAQFEVIKGQTIEVRCESISGTLPISYQLLKTSKVLENSTKNSNDPAVFKDNPTEDVEYQCVADNCHSHAKMLSEVLRVKVIAPVDEVQISILSSKVVESGEDIVLQCAVNEGSGPITYKFYREKEGKPFYQMTSNATQAFWTKQKASKEQEGEYYCTAFNRANHASSVPRSKILTVRVILAPWKKGLIAVVIIGVIIALLIIAAKCYFLRKAKAKQMPVEMSRPAVPLLNSNNEKMSDPNMEANSHYGHNDDVRNHAMKPINDNKEPLNSDVQYTEVQVSSAESHKDLGKKDTETVYSEVRKAVPDAVESRYSRTEGSLDGT

SEQ ID NO: 1445 - protein, 942 aa, Homo Sapiens
MASDAVQSEPRSWSLLEQLGLAGADLAAPGVQQQLELERERLRREIRKELKLKEGAENLRRATTDLGRSLGPVELLLRGSSRRLDLLHQQLQELHAHVVLPDPAATHDGPQSPGAGGPTCSATNLSRVAGLEKQLAIELKVKQGAENMIQTYSNGSTKDRKLLLTAQQMLQDSKTKIDIIRMQLRRALQAGQLENQAAPDDTQGSPDLGAVELRIEELRHHFRVEHAVAEGAKNVLRLLSAAKAPDRKAVSEAQEKLTESNQKLGLLREALERRLGELPADHPKGRLLREELAAASSAAFSTRLAGPFPATHYSTLCKPAPLTGTLEVRVVGCRDLPETIPWNPTPSMGGPGTPDSRPPFLSRPARGLYSRSGSLSGRSSLKAEAENTSEVSTVLKLDNTVVGQTSWKPCGPNAWDQSFTLELERARELELAVFWRDQRGLCALKFLKLEDFLDNERHEVQLDMEPQGCLVAEVTFRNPVIERIPRLRRQKKIFSKQQGKAFQRARQMNIDVATWVRLLRRLIPNATGTGTFSPGASPGSEARTTGDISVEKLNLGTDSDSSPQKSSRDPPSSPSSLSSPIQESTAPELPSETQETPGPALCSPLRKSPLTLEDFKFLAVLGRGHFGKVLLSEFRPSGELFAIKALKKGDIVARDEVESLMCEKRILAAVTSAGHPFLVNLFGCFQTPEHVCFVMEYSAGGDLMLHIHSDVFSEPRAIFYSACVVLGLQFLHEHKIVYRDLKLDNLLLDTEGYVKIADFGLCKEGMGYGDRTSTFCGTPEFLAPEVLTDTSYTRAVDWWGLGVLLYEMLVGESPFPGDDEEEVFDSIVNDEVRYPRFLSAEAIGIMRRLLRRNPERRLGSSERDAEDVKKQPFFRTLGWEALLARRLPPPFVPTLSGRTDVSNFDEEFTGEAPTLSPPRDARPLTAAEQAAFLDFDFVAGGC

SEQ ID NO: 1446 - protein, 908 aa, Homo Sapiens
MEEGGRDKAPVQPQQSPAAAPGGTDEKPSGKERRDAGDKDKEQELSEEDKQLQDELEMLVERLGEKDTSLYRPALEELRRQIRSSTTSMTSVPKPLKFLRPHYGKLKEIYENMAPGENKRFAADIISVLAMTMSGERECLKYRLVGSQEELASWGHEYVRHLAGEVAKEWQELDDAEKVQREPLLTLVKEIVPYNMAHNAEHEACDLLMEIEQVDMLEKDIDENAYAKVCLYLTSCVNYVPEPENSALLRCALGVFRKFSRFPEALRLALMLNDMELVEDIFTSCKDVVVQKQMAFMLGRHGVFLELSEDVEEYEDLTEIMSNVQLNSNFLALARELDIMEPKVPDDIYKTHLENNRFGGSGSQVDSARMNLASSFVNGFVNAAFGQDKLLTDDGNKWLYKNKDHGMLSAAASLGMILLWDVDGGLTQIDKYLYSSEDYIKSGALLACGIVNSGVRNECDPALALLSDYVLHNSNTMRLGSIFGLGLAYAGSNREDVLTLLLPVMGDSKSSMEVAGVTALACGMIAVGSCNGDVTSTILQTIMEKSETELKDTYARWLPLGLGLNHLGKGEAIEAILAALEVVSEPFRSFANTLVDVCAYAGSGNVLKVQQLLHICSEHFDSKEKEEDKDKKEKKDKDKKEAPADMGAHQGVAVLGIALIAMGEEIGAEMALRTFGHLLRYGEPTLRRAVPLALALISVSNPRLNILDTLSKFSHDADPEVSYNSIFAMGMVGSGTNNARLAAMLRQLAQYHAKDPNNLFMVRLAQGLTHLGKGTLTLCPYHSDRQLMSQVAVAGLLTVLVSFLDVRNIILGKSHYVLYGLVAAMQPRMLVTFDEELRPLPVSVRVGQAVDVVGQAGKPKTITGFQTHTTPVLLAHGERAELATEEFLPVTPILEGFVILRKNPNYDL

SEQ ID NO: 1447 - protein, 249 aa, Homo Sapiens
MAMLRVQPEAQAKVDVFREDLCTKTENLLGSYFPKKISELDAFLKEPALNEANLSNLKAPLDIPVPDPVKEKEKEERKKQQEKEDKDEKKKGEDEDKGPPCGPVNCNEKIVVLLQRLKPEIKDVIEQLNLVTTWLQLQIPRIEDGNNFGVAVQEKVFELMTSLHTKLEGFHTQISKYFSERGDAVTKAAKQPHVGDYRQLVHELDEAEYRDIRLMVMEIRNAYAVLYDIILKNFEKLKKPRGETKGMIY

SEQ ID NO: 1448 - protein, 1501 aa, Homo Sapiens
MAPTWGPGMVSVVGPMGLLVVLLVGGCAAEEPPRFIKEPKDQIGVSGGVASFVCQATGDPKPRVTWNKKGKKVNSQRFETIEFDESAGAVLRIQPLRTPRDENVYECVAQNSVGEITVHAKLTVLREDQLPSGFPNIDMGPQLKVVERTRTATMLCAASGNPDPEITWFKDFLPVDPSASNGRIKQLRSGALQIESSEETDQGKYECVATNSAGVRYSSPANLYVRVRRVAPRFSILPMSHEIMPGGNVNITCVAVGSPMPYVKWMQGAEDLTPEDDMPVGRNVLELTDVKDSANYTCVAMSSLGVIEAVAQITVKSLPKAPGTPMVTENTATSITITWDSGNPDPVSYYVIEYKSKSQDGPYQIKEDITTTRYSIGGLSPNSEYEIWVSAVNSIGQGPPSESVVTRTGEQAPASAPRNVQARMLSATTMIVQWEEPVEPNGLIRGYRVYYTMEPEHPVGNWQKHNVDDSLLTTVGSLLEDETYTVRVLAFTSVGDGPLSDPIQVKTQQGVPGQPMNLRAEARSETSITLSWSPPRQESIIKYELLFREGDHGREVGRTFDPTTSYVVEDLKPNTEYAFRLAARSPQGLGAFTPVVRQRTLQSISPKNFKVKMIMKTSVLLSWEFPDNYNSPTPYKIQYNGLTLDVDGRTTKKLITHLKPHTFYNFVLTNRGSSLGGLQQTVTAWTAFNLLNGKPSVAPKPDADGFIMVYLPDGQSPVPVQSYFIVMVPLRKSRGGQFLTPLGSPEDMDLEELIQDISRLQRRSLRHSRQLEVPRPYIAARFSVLPPTFHPGDQKQYGGFDNRGLEPGHRYVLFVLAVLQKSEPTFAASPFSDPFQLDNPDPQPIVDGEEGLIWVIGPVLAVVFIICIVIAILLYKNKPDSKRKDSEPRTKCLLNNADLAPHHPKDPVEMRRINFQTPGMLSHPPIPIADMAEHTERLKANDSLKLSQEYESIDPGQQFTWEHSNLEVNKPKNRYANVIAYDHSRVILQPIEGIMGSDYINANYVDGYRCQNAYIATQGPLPETFGDFWRMVWEQRSATIVMMTRLEEKSRIKCDQYWPNRGTETYGFIQVTLLDTIELATFCVRTFSLHKNGSSEKREVRQFQFTAWPDHGVPEYPTPFLAFLRRVKTCNPPDAGPIVVHCSAGVGRTGCFIVIDAMLERIKPEKTVDVYGHVTLMRSQRNYMVQTEDQYSFIHEALLEAVGCGNTEVPARSLYAYIQKLAQVEPGEHVTGMELEFKRLANSKAHTSRFISANLPCNKFKNRLVNIMPYESTRVCLQPIRGVEGSDYINASFIDGYRQQKAYIATQGPLAETTEDFWRMLWENNSTIVVMLTKLREMGREKCHQYWPAERSARYQYFVVDPMAEYNMPQYILREFKVTDARDGQSRTVRQFQFTDWPEQGVPKSGEGFIDFIGQVHKTKEQFGQDGPISVHCSAGVGRTGVFITLSIVLERMRYEGVVDIFQTVKMLRTQRPAMVQTEDEYQFCYQAALEYLGSFDHYAT

SEQ ID NO: 1449 - protein, 135 aa, Homo Sapiens [sequence omitted]

SEQ ID NO: 1450 - protein, 664 aa, Homo Sapiens
MSGVRGLSRLLSARRLALAKAWPTVLQTGTRGFHFTVDGNKRASAKVSDSISAQYPVVDHEFDAVVVGAGGAGLRAAFGLSEAGFNTACVTKLFPTRSHTVAAQGGINAALGNMEEDNWRWHFYDTVKGSDWLGDQDAIHYMTEQAPAAVVELENYGMPFSRTEDGKIYQRAFGGQSLKFGKGGQAHRCCCVADRTGHSLLHTLYGRSLRYDTSYFVEYFALDLLMENGECRGVIALCIEDGSIHRIRAKNTVVATGGYGRTYFSCTSAHTSTGDGTAMITRAGLPCQDLEFVQFHPTGIYGAGCLITEGCRGEGGILINSQGERFMERYAPVAKDLASRDVVSRSMTLEIREGRGCGPEKDHVYLQLHHLPPEQLATRLPGISETAMIFAGVDVTKEPIPVLPTVHYNMGGIPTNYKGQVLRHVNGQDQIVPGLYACGEAACASVHGANRLGANSLLDLVVFGRACALSIEESCRPGDKVPPIKPNAGEESVMNLDKLRFADGSIRTSELRLSMQKSMQNHAAVFRVGSVLQEGCGKISKLYGDLKHLKTFDRGMVWNTDLVETLELQNLMLCALQTIYGAEARKESRGAHAREDYKVRIDEYDYSKPIQGQQKKPFEEHWRKHTLSYVDVGTGKVTLEYRPVIDKTLNEADCATVPPAIRSY

SEQ ID NO: 1451 - protein, 248 aa, Homo Sapiens
MSGGGVIRGPAGNNDCRIYVGNLPPDIRTKDIEDVFYKYGAIRDIDLKNRRGGPPFAFVEFEDPRDAEDAVYGRDGYDYDGYRLRVEFPRSGRGTGRGGGGGGGGGAPRGRYGPPSRRSENRVVVSGLPPSGSWQDLKDHMREAGDVCYADVYRDGTGVVEFVRKEDMTYAVRKLDNTKFRSHEGETAYIRVKVDGPRSPSYGRSRSRSRSRSRSRSRSNSRSRSYSPRRSRGSPRYSPRHSRSRSRT

SEQ ID NO: 1452 - protein, 65 aa, Homo Sapiens [sequence omitted]

SEQ ID NO: 1453 - protein, 540 aa, Homo Sapiens
MDSVAFEDVDVNFTQEEWALLDPSQKNLYRDVMWETMRNLASIGKKWKDQNIKDHYKHRGRNLRSHMLERLYQTKDGSQRGGIFSQFANQNLSKKIPGVKLCESIVYGEVSMGQSSLNRHIKDHSGHEPKEYQEYGEKPDTRNQCWKPFSSHHSFRTHEIIHTGEKLYDCKECGKTFFSLKRIRRHIITHSGYTPYKCKVCGKAFDYPSRFRTHERSHTGEKPYECQECGKAFTCITSVRRHMIKHTGDGPYKCKVCGKPFHSLSSFQVHERIHTGEKPFKCKQCGKAFSCSPTLRIHERTHTGEKPYECKQCGKAFSYLPSLRLHERIHTGEKPFVCKQCGKAFRSASTFQIHERTHTGEKPYECKECGEAFSCIPSMRRHMIKHTGEGPYKCKVCGKPFHSLSPFRIHERTHTGEKPYVCKHCGKAFVSSTSIRIHERTHTGEKPYECKQCGKAFSYLNSFRTHEMIHTGEKPFECKRCGKAFRSSSSFRLHERTHTGQKPYHCKECGKAYSCRASFQRHMLTHAEDGPPYKCMWESL

SEQ ID NO: 1454 - protein, 325 aa, Homo Sapiens
MKPILLQGHERSITQIKYNREGDLLFTVAKDPIVNVWYSVNGERLGTYMGHTGAVWCVDADWDTKHVLTGSADNSCRLWDCETGKQLALLKTNSAVRTCGFDFGGNIIMFSTDKQMGYQCFVSFFDLRDPSQIDNNEPYMKIPCNDSKITSAVWGPLGECIIAGHESGELNQYSAKSGEVLVNVKEHSRQINDIQLSRDMTMFVTASKDNTAKLFDSTTLEHQKTFRTERPVNSAALSPNYDHVVLGGGQEAMDVTTTSTRIGKFEARFFHLAFEEEFGRVKGHFGPINSVAFHPDGKSYSSGGEDGYVRIHYFDPQYFEFEFEA

SEQ ID NO: 1455 - protein, 537 aa, Homo Sapiens
MAHCVTLVQLSISCDHLIDKDIGSKSDPLCVLLQDVGGGSWAELGRTERVRNCSSPEFSKTLQLEYRFETVQKLRFGIYDIDNKTPELRDDDFLGGAECSLGQIVSSQVLTLPLMLKPGKPAGRGTITVSAQELKDNRVVTMEVEARNLDKKDFLGKSDPFLEFFRQGDGKWHLVYRSEVIKNNLNPTWKRFSVPVQHFCGGNPSTPIQVQCSDYDSDGSHDLIGTFHTSLAQLQAVPAEFECIHPEKQQKKKSYKNSGTIRVKICRVETEYSFLDYVMGGCQINFTVGVDFTGSNGDPSSPDSLHYLSPTGVNEYLMALWSVGSVVQDYDSDKLFPAFGFGAQVPPDWQVSHEFALNFNPSNPYCAGIQGIVDAYRQALPQVRLYGPTNFAPIINHVARFAAQAAHQGTASQYFMLLLLTDGAVTDVEATREAVVRASNLPMSVIIVGVGGADFEAMEQLDADGGPLHTRSGQAAARDIVQFVPYRRFQNAPREALAQTVLAEVPTQLVSYFRAQGWAPLKPLPPSAKDPAQAPQA

SEQ ID NO: 1456 - protein, 2017 aa, Homo Sapiens
MSLGLARAQEVELTLETVIQTLESSVLCQEKGLGARDLAQDAQITSLPALIREIVTRNLSQPESPVLLPATEMASLLSLQEENQLLQQELSRVEDLLAQSRAERDELAIKYNAVSERLEQALRLEPGELETQEPRGLVRQSVELRRQLQEEQASYRRKLQAYQEGQQRQAQLVQRLQGKILQYKKRCSELEQQLLERSGELEQQRLRDTEHSQDLESALIRLEEEQQRSASLAQVNAMLREQLDQAGSANQALSEDIRKVTNDWTRCRKELEHREAAWRREEESFNAYFSNEHSRLLLLWRQVVGFRRLVSEVKMFTERDLLQLGGELARTSRAVQEAGLGLSTGLRLAESRAEAALEKQALLQAQLEEQLRDKVLREKDLAQQQMQSDLDKADLSARVTELGLAVKRLEKQNLEKDQVNKDLTEKLEALESLRLQEQAALETEDGEGLQQTLRDLAQAVLSDSESGVQLSGSERTADASNGSLRGLSGQRTPSPPRRSSPGRGRSPRRGPSPACSDSSTLALIHSALHKRQLQVQDMRGRYEASQDLLGTLRKQLSDSESERRALEEQLQRLRDKTDGAMQAHEDAQREVQRLRSANELLSREKSNLAHSLQVAQQQAEELRQEREKLQAAQEELRRQRDRLEEEQEDAVQDGARVRRELERSHRQLEQLEGKRSVLAKELVEVREALSRATLQRDMLQAEKAEVAEALTKAEAGRVELELSMTKLRAEEASLQDSLSKLSALNESLAQDKLDLNRLVAQLEEEKSALQGRQRQAEQEATVAREEQERLEELRLEQEVARQGLEGSLRVAEQAQEALEQQLPTLRHERSQLQEQLAQLSRQLSGREQELEQARREAQRQVEALERAAREKEALAKEHAGLAVQLVAAEREGRTLSEEATRLRLEKEALEGSLFEVQRQLAQLEARREQLEAEGQALLLAKETLTGELAGLRQQIIATQEKASLDKELMAQKLVQAEREAQASLREQRAAHEEDLQRLQREKEAAWRELEAERAQLQSQLQREQEELLARLEAEKEELSEEIAALQQERDEGLLLAESEKQQALSLKESEKTALSEKLMGTRHSLATISLEMERQKRDAQSRQEQDRSTVNALTSELRDLRAQREEAAAAHAQEVRRLQEQARDLGKQRDSCLREAEELRTQLRLLEDARDGLRRELLEAQRKLRESQEGREVQRQEAGELRRSLGEGAKEREALRRSNEELRSAVKKAESERISLKLANEDKEQKLALLEEARTAVGKEAGELRTGLQEVERSRLEARRELQELRRQMKMLDSENTRLGRELAELQGRLALGERAEKESRRETLGLRQRLLKGEASLEVMRQELQVAQRKLQEQEGEFRTRERRLLGSLEEARGTEKQQLDHARGLELKLEAARAEAAELGLRLSAAEGRAQGLEAELARVEVQRRAAEAQLGGLRSALRRGLGLGRAPSPAPRPVPGSPARDAPAEGSGEGLNSPSTLECSPGSQPPSPGPATSPASPDLDPEAVRGALREFLQELRSAQRERDELRTQTSALNRQLAEMEAERDSATSRARQLQKAVAESEEARRSVDGRLSGVQAELALQEESVRRSERERRATLDQVATLERSLQATESELRASQEKISKMKANETKLEGDKRRLKEVLDASESRTVKLELQRRSLEGELQRSRLGLSDREAQAQALQDRVDSLQRQVADSEVKAGTLQLTVERLNGALAKVEESEGALRDKVRGLTEALAQSSASLNSTRDKNLHLQKALTACEHDRQVLQERLDAARQALSEARKQSSSLGEQVQTLRGEVADLELQRVEAEGQLQQLREVLRQRQEGEAAALNTVQKLQDERRLLQERLGSLQRALAQLEAEKREVERSALRLEKDRVALRRTLDKVEREKLRSHEDTVRLSAEKGRLDRTLTGAELELAEAQRQIQQLEAQVVVLEQSHSPAQLEVDAQQQQLELQQEVERLRSAQAQTERTLEARERAHRQRVRGLEEQVSTLKGQLQQELRRSSAPFSPPSGPPEK

SEQ ID NO: 1457 - protein, 803 aa, Homo Sapiens
MAKRSSLYIRIVEGKNLPAKDITGSSDPYCIVKVDNEPIIRTATVWKTLCPFWGEEYQVHLPPTFHAVAFYVMDEDALSRDDVIGKVCLTRDTIASHPKGFSGWAHLTEVDPDEEVQGEIHLRLEVWPGARACRLRCSVLEARDLAPKDRNGTSDPFVRVRYKGRTRETSIVKKSCYPRWNETFEFELQEGAMEALCVEAWDWDLVSRNDFLGKVVIDVQRLRVVQQEEGWFRLQPDQSKSRRHDEGNLGSLQLEVRLRDETVLPSSYYQPLVHLLCHEVKLGMQGPGQLIPLIEETTSTECRQDVATNLLKLFLGQGLAKDFLDLLFQLELSRTSETNTLFRSNSLASKSMESFLKVAGMQYLHGVLGPIINKVFEEKKYVELDPSKVEVKDVGCSGLHRPQTEAEVLEQSAQTLRAHLGALLSALSRSVRACPAVVRATFRQLFRRVRERFPGAQHENVPFIAVTSFLCLRFFSPAIMSPKLFHLRERHADARTSRTLLLLAKAVQNVGNMDTPASRAKEAWMEPLQPTVRQGVAQLKDFITKLVDIEEKDELDLQRTLSLQAPPVKEGPLFIHRTKGKGPLMSSSFKKLYFSLTTEALSFAKTPSSKKSALIKLANIRAAEKVEEKSFGGSHVMQVIYTDDAGRPQTAYLQCKCVNELNQWLSALRKVSINNTGLLGSYHPGVFRGDKWSCCHQKEKTGQGCDKTRSRVTLQEWNDPLDHDLEAQLIYRHLLGVEAMLWERHRELSGGAEAGTVPTSPGKVPEDSLARLLRVLQDLREAHSSSPAGSPPSEPNCLLELQT

SEQ ID NO: 1458 - protein, 310 aa, Homo Sapiens
MDRLLRLGGGMPGLGQGPPTDAPAVDTAEQVYISSLALLKMLKHGRAGVPMEVMGLMLGEFVDDYTVRVIDVFAMPQSGTGVSVEAVDPVFQAKMLDMLKQTGRPEMVVGWYHSHPGFGCWLSGVDINTQQSFEALSERAVAVVVDPIQSVKGKVVIDAFRLINANMMVLGHEPRQTTSNLGHLNKPSIQALIHGLNRHYYSITINYRKNELEQKMLLNLHKKSWMEGLTLQDYSEHCKHNESVVKEMLELAKNYNKAVEEEDKMTPEQLAIKNVGKQDPKRHLEEHVDVLMTSNIVQCLAAMLDTVVFK

SEQ ID NO: 1459 - protein, 135 aa, Homo Sapiens
MPGRWRWQRDMHPARKLLSLLFLILMGTELTQVLPTNPEESWQVYSSAQDSEGRCICTVVAPQQTMCSRDARTKQLRQLLEKVQNMSQSIEVLDRRTQRDLQYVEKMENQMKGLESKFKQVEESHKQHLARQFKG

SEQ ID NO: 1460 - protein, 335 aa, Homo Sapiens
MAAGAAEAAVAAVEEVGSAGQFEELLRLKAKSLLVVHFWAPWAPQCAQMNEVMAELAKELPQVSFVKLEAEGVPEVSEKYEISSVPTFLFFKNSQKIDRLDGAHAPELTKKVQRHASSGSFLPSANEHLKEDLNLRLKKLTHAAPCMLFMKGTPQEPRCGFSKQMVEILHKHNIQFSSFDIFSDEEVRQGLKAYSSWPTYPQLYVSGELIGGLDIIKELEASEELDTICPKAPKLEERLKVLTNKASVMLFMKGNKQEAKCGFSKQILEILNSTGVEYETFDILEDEEVRQGLKAYSNWPTYPQLYVKGELVGGLDIVKELKENGELLPILRGEN

SEQ ID NO: 1461 - protein, 308 aa, Homo Sapiens
MAPPAPGPASGGSGEVDELFDVKNAFYIGSYQQCINEAQRVKLSSPERDVERDVFLYRAYLAQRKFGVVLDEIKPSSAPELQAVRMFADYLAHESRRDSIVAELDREMSRSVDVTNTTFLLMAASIYLHDQNPDAALRALHQGDSLECTAMTVQILLKLDRLDLARKELKRMQDLDEDATLTQLATAWVSLATGGEKLQDAYYIFQEMADKCSPTLLLLNGQAACHMAQGRWEAAEGLLQEALDKDSGYPETLVNLIVLSQHLGKPPEVTNRYLSQLKDAHRSHPFIKEYQAKENDFDRLVLQYAPSA

SEQ ID NO: 1462 - protein, 285 aa, Homo Sapiens
MSSRRDTDSDTQDANDSSCKSSERSLPDCTPHPNSISIDAGPRQAPKIAQIKRNLSYGDNSDPALEASSLPPPDPWLETSSSSPAEPAQPGACRRDGYWFLKLLQAETERLEGWCCQMDKETKENNLSEEVLGKVLSAVGSAQLLMSQKFQQFRGLCEQNLNPDANPRPTAQDLAGFWDLLQLSIEDISMKFDELYHLKANSWQLVETPEKRKEEKKPPPPVPKKPAKSKPAVSRDKASDASDKQRQEARKRLLAAKRAASVRQNSATESADSIEIYVPEAQTRL

SEQ ID NO: 1463 - protein, 359 aa, Homo Sapiens
MSDEGSRGSRLPLALPPASQGCSSGGGGGGSSAGGSGNSRPPRNLQGLLQMAITAGSEEPDPPPEPMSEERRQWLQEAMSAAFRGQREEVEQMKSCLRVLSQPMPPTAGEAEQAADQQEREGALELLADLCENMDNAADFCQLSGMHLLVGRYLEAGAAGLRWRAAQLIGTCSQNVAAIQEQVLGLGALRKLLRLLDRDACDTVRVKALFAISCLVREQEAGLLQFLRLDGFSVLMRAMQQQVQKLKVKSAFLLQNLLVGHPEHKGTLCSMGMVQQLVALVRTEHSPFHEHVLGALCSLVTDFPQGVRECREPELGLEELLRHRCQLLQQHEEYQEELEFCEKLLQTCFSSPADDSMDR

SEQ ID NO: 1464 - protein, 193 aa, Homo Sapiens
MFKNTFQSGFLSILYSIGSKPLQIWDKKVRNGHIKRITDNDIQSLVLEIEGTNVSTTYITCPADPKKTLGIKLPFLVMIIKNLKKYFTFEVQVLDDKNVRRRFRASNYQSTTRVKPFICTMPMRLDDGWNQIQFNLLDFTRRAYGTNYIETLRVQIHANCRIRRVYFSDRLYSEDELPAEFKLYLPVQNKAKQ

SEQ ID NO: 1465 - protein, 109 aa, Homo Sapiens
MNPALGNQTDVAGLFLANSSEALERAVRCCTQASVVTDDGFAEGGPDERSLYIMRVVQIAVMCVLSLTVVFGIFFLGCNLLIKSEGMINFLVKDRRPSKEVEAVVVGPY

SEQ ID NO: 1466 - protein, 711 aa, Homo Sapiens
MMADAKYVLCRWEKRLWPAKVLARTATSTKNKRRKEYFLAVQILSLEEKIKVKSTEVEILEKSQIEAIASSLASQNEVPAAPLEELAYRRSLRVALDVLSEGSIWSQESSAGTGRADRSLRGKPMEHVSSPCDSNSSSLPRGDVLGSSRPHRRRPCVQQSLSSSFTCEKDPECKVDHKKGLRKSENPRGPLVLPAGGGAQDESGSRIHHKNWTLASKRGGNSAQKASLCLNGSSLSEDDTERDMGSKGGSWAAPSLPSGVREDDPCANAEGHDPGLPLGSLTAPPAPEPSACSEPGECPAKKRPRLDGSQRPPAVQLEPMAAGAAPSPGPGPGPRESVTPRSTARLGPPPSHASADATRCLPCPDSQKLEKECQSSEESMGSNSMRSILEEDEEDEEPPRVLLYHEPRSFEVGMLVWHKHKKYPFWPAVVKSVRQRDKKASVLYIEGHMNPKMKGFTVSLKSLKHFDCKEKQTLLNQAREDFNQDIGWCVSLITDYRVRLGCGSFAGSFLEYYAADISYPVRKSIQQDVLGTKLPQLSKGSPEEPVVGCPLGQRQPCRKMLPDRSRAARDRANQKLVEYIVKAKGAESHLRAILKSRKPSRWLQTFLSSSQYVTCVETYLEDEGQLDLVVKYLQGVYQEVGAKVLQRTNGDRIRFILDVLLPEAIICAISAVDEVDYKTAEEKYIKGPSLSYREKEIFDNQLLEERNRRRR

SEQ ID NO: 1467 - protein, 963 aa, Homo Sapiens
MAAHLKKRVYEEFTKVVQPQEEIATKKLRLTKPSKSAALHIDLCKATSPADALQYLLQFARKPVEAESVEGVVRILLEHYYKENDPSVRLKIASLLGLLSKTAGFSPDCIMDDAINILQNEKSHQVLAQLLDTLLAIGTKLPENQAIQMRLVDVACKHLTDTSHGVRNKCLQLLGNLGSLEKSVTKDAEGLAARDVQKIIGDYFSDQDPRVRTAAIKAMLQLHERGLKLHQTIYNQACKLLSDDYEQVRSAAVQLIWVVSQLYPESIVPIPSSNEEIRLVDDAFGKICHMVSDGSWVVRVQAAKLLGSMEQVSSHFLEQTLDKKLMSDLRRKRTAHERAKELYSSGEFSSGRKWGDDAPKEEVDTGAVNLIESGACGAFVHGLEDEMYEVRIAAVEALCMLAQSSPSFAEKCLDFLVDMFNDEIEEVRLQSIHTMRKISNNITLREDQLDTVLAVLEDSSRDIREALHELLCCTNVSTKEGIHLALVELLKNLTKYPTDRDSIWKCLKFLGSRHPTLVLPLVPELLSTHPFFDTAEPDMDDPAYIAVLVLIFNAAKTCPTMPALFSDHTFRHYAYLRDSLSHLVPALRLPGRKLVSSAVSPSIIPQEDPSQQFLQQSLERVYSLQHLDPQGAQELLEFTIRDLQRLGELQSELAGVADFSATYLRCQLLLIKALQEKLWNVAAPLYLKQSDLASAAAKQIMEETYKMEFMYSGVENKQVVIIHHMRLQAKALQLIVTARTTRGLDPLFGMCEKFLQEVDFFQRYFIADLPHLQDSFVDKLLDLMPRLMTSKPAEVVKILQTMLRQSAFLHLPLPEQIHKASATIIEPAGESDNPLRFTSGLVVALDVDATLEHVQDPQNTVKVQVLYPDGQAQMIHPKPADFRNPGPGRHRLITQVYLSHTAWTEACQVEVRLLLAYNSSARIPKCPWMEGGEMSPQVETSIEGTIPFSKPVKVYIMPKPARR

1-16. (canceled)

17. A method for identifying marker sequences for gynaecological malignoma, characterised in that
a) marker sequence candidates for gynaecological malignoma are identified by bringing a support, on which at least 1,000 different proteins are immobilised, into contact with a serum sample from a patient with gynaecological malignoma and proteins that demonstrate an interaction with the serum are identified as marker sequence candidates, and
b) the interaction of one or more marker sequence candidates from a) with the serum from female patients with gynaecological malignoma is determined compared with
the interaction of the marker sequence candidate(s) from a) with the serum from female patients with benign changes and
the interaction of the marker sequence candidate(s) from a) with the serum of healthy control individuals, and
c) marker sequences are identified that demonstrate an interaction with the serum from female patients with gynaecological malignoma that is different compared with the interaction with the serum from female patients with benign changes and the serum from healthy control individuals.

18. The method according to claim 17, characterised in that, for the comparison, the data concerning the interaction are evaluated by means of statistical analysis.

19. A marker sequence for gynaecological malignoma obtained by a method according to claim 17, wherein the marker sequence is selected from the group consisting of sequences comprising SEQ ID NOS: 1-1467 and partial sequences of SEQ ID NOS: 1-1467 with at least 90%, preferably 95%, of the length of the sequences SEQ ID NOS: 1-1467 and homologues of SEQ ID NOS: 1-1467 and partial sequences thereof with an identity of at least 95%, preferably 98% or more, to the corresponding nucleic acid and/or protein sequences and sequences coded by SEQ ID NOS: 1-489, partial sequences thereof and homologues thereof.

20. An arrangement of marker sequences for gynaecological malignoma, comprising one or more marker sequences according to claim 19.

21. A protein array comprising one or more marker sequences according to claim 19.

22. A diagnostic tool comprising one or more marker sequences according to claim 19 and optionally further additives and/or excipients.

23. A test kit comprising one or more marker sequences according to claim 19 and optionally further additives and/or excipients.

24. The arrangement according to claim 20, wherein 2 or 3 different marker sequences for gynaecological malignoma are used simultaneously.

25. Use of one or more marker sequences according to claim 19 for the early detection, diagnosis, prognosis, therapy control and/or aftercare in the case of gynaecological malignoma.

26. Use of one or more marker sequences according to claim 19 to distinguish gynaecological malignoma from benign changes.

27. Use of one or more marker sequences according to claim 19 for the individualised diagnosis and/or therapy in individual patients, patient groups, cohorts, population groups, variants of gynaecological malignoma, or stages of gynaecological malignoma.

28. Use of one or more marker sequences according to claim 19 for the detection and/or for the determination of the quantity of one or more gynaecological malignoma-associated autoantibodies, for example in bodily fluid or tissue of a patient.

29. Use of one or more marker sequences according to claim 19 for the analysis of autoantibody profiles of patients, in particular for the qualitative and/or quantitative analysis of autoantibodies and/or for the monitoring of changes of autoantibody profiles, for example in bodily fluids such as serum, tissue or tissue samples from the patient.

30. Use of one or more marker sequences according to claim 19 for the screening of substances (active agents) for gynaecological malignoma.

31. A target for the treatment and/or therapy of gynaecological malignoma selected from one of the marker sequences according to claim 19.

32. A method for the early detection, diagnosis, prognosis, therapy control and/or aftercare in the case of gynaecological malignoma, wherein
a) a marker sequence or a number of marker sequences selected from the group comprising sequences SEQ ID NOS: 1-1467 and partial sequences of SEQ ID NOS: 1-1467 with at least 90%, preferably 95%, of the length of the sequences SEQ ID NOS: 1-1467 and homologues of SEQ ID NOS: 1-1467 and partial sequences thereof with an identity of at least 95%, preferably 98% or more, to the corresponding nucleic acid and/or protein sequences and sequences coded by SEQ ID NOS: 1-489, partial sequences thereof and homologues thereof is/are applied to a support,
b) the marker sequence or number of marker sequences is/are brought into contact with bodily fluid or tissue sample from a patient, and
c) an interaction of the bodily fluid or the tissue sample with the marker sequence(s) for gynaecological malignoma from a) is detected.
